United States Patent Application Publication US 2022/0098672 A1 - sequence listing, part 5

SEQ ID NO: 39659 - DNA, 213 bp, Homo sapiens
  chr11:120367550-120367763
  hypo
cgattaaactccgctttgtttcagagatgatcataatttggccagcttcatttccctctactgtccatcgtgagccctcttccccagtaaggcttaggctcctccaagtctccccacctcacattctaggccgggactccacctttgcttttcccttagtctgaaatgtactttggaaacttccaagatgagtattaaaagtaatagctggcc

SEQ ID NO: 39660 - DNA, 533 bp, Homo sapiens
  chr11:121593326-121593859
  hyper
cgtggtcccgccaaacaaaggaacatgtgtgctgcaaaccatccccctatcacgggagcgcagagctccgccaggagagggccgggcctgcgcactctaatttttcactgcagtttaaacactccgtgaggctctcaggaagcggcgggggtggggggcggccggagagaaggggcccgcgtctccgccgcttccatcaccgccctggaaatagcatctgaacgcgcacggcccgaccaggcttcccccaagctgctaagatttcatttcacctccgacaggcttcatggggactcgctgttaaaagatcactctcccgggatgctgtcgtgggggagggggcccggcactgtatacagctgtcaaaacgtctccgacaggagacgaaggcacatctgcacaagcctgtctcaggctgcggggcacacagggagcgcctcaaacctatcagtgtaatgccgagcggtaattgcattaggattagttatctcctgtgctctgctcattagcccggaggatggctcgcatccagc

SEQ ID NO: 39661 - DNA, 43 bp, Homo sapiens; identical to SEQ ID NO: 27501
  chr11:125757376-125757419
  hyper

SEQ ID NO: 39662 - DNA, 1201 bp, Homo sapiens; identical to SEQ ID NO: 27504
  chr11:128562635-128563836
  binary

SEQ ID NO: 39663 - DNA, 1617 bp, Homo sapiens; identical to SEQ ID NO: 23804
  chr11:128563902-128565519
  binary

SEQ ID NO: 39664 - DNA, 480 bp, Homo sapiens; identical to SEQ ID NO: 26196
  chr11:132952521-132953001
  binary

SEQ ID NO: 39665 - DNA, 255 bp, Homo sapiens; identical to SEQ ID NO: 26197
  chr11:132953051-132953306
  binary

SEQ ID NO: 39666 - DNA, 2252 bp, Homo sapiens
  chr11:133825204-133827456
  binary
cgtccggaccaacatgtcagttaacaaaatcacccttcgcttcgccctctgctcgttctgttttcagacaccaccacccccctcagaagcagaggcgacatattcattccattccggaaagtttcctgaagcacgcccccctgcacagacgagtgacgaggggaccccgtgagaggcgcctccagcccacccggcgccccatgccgctgggagagggttctctgtcggcgagtcctgcctgctgactcccacccacagcgggttctctcccgccgccatctcctccggcttggtgaacttgcccgcagccgggtcgtgtctgcgcgctgacagccctgagctcacagtcctggcaccctccaggctccgctcccacttccatacaagggccgagagccgggggtgccacccagaggcttgtaggtcgctctgcccatctccaaagcaaaagcccgcgcgctcacgcacgcatcacccaactcggtggctccccccttgcgtctcccccagctcagacccaggaaagcggaaagagaaaatcccccctccgctcggattcacagcgtggggacccccccttccccgcccctcccctcccccgccgccgcccccagccagctctgcctcgcagcctggggagggcggcgtggggcccgcgcggctgcggcgcgctcccggggaacttttgcctggccggggcccaggtgcggctgagaggcgcgggggccggcggggtccagccaaaagcggacacacctcgaagctggcctcatcaatcctcctctcaccgggcgcccctgctagggggatccgacctccagctgccaagatgtgtgggcaggaggggcgcgagcggagcgatggacgcccgcagggccgcgcgaacccggggccttagacgcgggtgccgccagtcccagggatcctccgggtcgcgcctccctgcaggcgctcctcgcggcgcggggctctagcgtgctgcagcctgcccggagaccgcaaactcccgcagccagagtttcccgcagctctgggaggcggccgccgggcaggaggcgacgggctaggcgcgccggtgtgcaccgtggggcccgtggtgggcgaagtcgacccaggttccactgcgtcctttccccgagtgcccggcagcccgtgggctctggccccttcccgcccgcccctccagcccacggcccccaggccctccccggcaatgctcccgggccgcctggcccgcgtcggagcccaagcctcacccgcgggaaggcgcgccggggagctggggaaccggggggccaaggagccgggaaaccgaggggccgggcgcgaggggccgagggcgccgggaggggcaggggagggacgccgcacttcaactcaccttcagccgcaagccctcgggtgccgatcacacttgctatgaaagtggccacataccaaatcatagtactaccgcgccagcccggagcctcatcctatcgcaaagtgctcccgcgcccgcacgcgcctcgcgcccgagcgcccgcctcgcgcccgcctcgcgccgcctacgccccgcgccggtgctcctgcagcccgggtggccagctctccatccctcctaggctccgctcggctcggcgcgcgcctccccggccccggcgcagcggcacctgcactactcgcccgggcggagcgcagccaggtccacggtgaagcctagccgggccgggcctccggaaccgcccccgccgcccgcctattgggcgccgcccgcaagccgggggtccgattggctcagccttccgcccgtcgcggcgcgaaggaggcgagcccatttcaaggtgcgttgaagtgtggcgagcacagagccgcagaatcatgcgcattgccggggagaaggtggtatagcgtctctgcccgcttctctctcggctcacactgcgtggcaagtttctggtgagggaaatggtagcttctaacgggaccctggcgggtctcaattaccccggacaggtctgagggaagtggagcccccgcccactcatggaacccaacatccggtttccatccggcaaaaagcagttcccgagaggaccatgctgattctatgatggggaaacccaggagccggcggcccgggagagccggggaacgtccttcgccggagatcttttcaaagaggtcacgcgccgcctccccaccccgtctccctccgcacccagacacgtccccagagcagcgcaccaccccctccaaacgtgatgcagacc

SEQ ID NO: 39667 - DNA, 842 bp, Homo sapiens; identical to SEQ ID NO: 22771
  chr11:133938756-133939598
  binary

SEQ ID NO: 39668 - DNA, 879 bp, Homo sapiens; identical to SEQ ID NO: 33297
  chr11:1466353-1467232
  hypo

SEQ ID NO: 39669 - DNA, 739 bp, Homo sapiens; identical to SEQ ID NO: 32483
  chr11:17373019-17373758
  hyper

SEQ ID NO: 39670 - DNA, 203 bp, Homo sapiens; identical to SEQ ID NO: 21730
  chr11:17374000-17374203
  hyper

SEQ ID NO: 39671 - DNA, 161 bp, Homo sapiens
  chr11:1824131-1824292
  hypo
cggtggaggatggaggggccaggctcgtcatacgcctgcttgctgatccacatctgctggaaggtggatggcgaggccgggatggagccgctgatccacgcagagtatttgcgctcgggaggagcaatgacgttgatcttcatcgtgccaggcgccagggc

SEQ ID NO: 39672 - DNA, 917 bp, Homo sapiens; identical to SEQ ID NO: 14537
  chr11:19798519-19799436
  hyper

SEQ ID NO: 39673 - DNA, 1401 bp, Homo sapiens
  chr11:20618197-20619598
  hyper
cgaatggctgcgcggtgatggatgcggatttacggcctccttggctgcggcgcgctgggcctgattatcactataaacaggcgtccgcggagggcgggggcggaggcccgcgtctagaggacgtgcggctggtcttcttcttcttcttcttctttttttttgtttttgttttttaatactgcggttccatcctctgcgcttcgtaggcgctgacacacacccatacgcacgacctgctgccccagggcctggcttcctgcctccgcatgctctctcccgcccctgaagcccaaccttcaagccctgctgatgcccgcccctccgtcccagcgttggcctcatagcgaaccctcttaggcctctccgttccagaccctccctccattctccacgtagcccctcccttctagaatcttgcggctgaaagtgggggcaggcggggagcccgaatagcgcctcagccaaaccccgcagccgttcctgcgcgtcacccgcctctgcagagcctgacgcgcggcagtctccacgccggaacccaagtgctcactgggccggggagggccagcgggcgaaatatcaggcctgggggctgagcgggggcgctgggcgtcactcaggcccagggccgcagctgggggaagtgagaaggccggcaggattctgcccactctgcgcagttctcccttcctcccggggcagccaagtctgtgcgccctggaacgtccgggcgccgcgtagactctccattcgcacctggccctttgcgggggctgctcaaatgcaaattgggaaactggccagaaccttccaaagtcgtgactgtccctcggggaagtcggccggggaaccgcagagggaggcctacaccgatctttgggcccgcctcgtggtaccgctccggccgatcgctctctgagcccgagcctgcctgccaggcctgccttctacagttctcgcattcgtcttgagccctctcggaaactggggactgtttaggcagaaacactcgtaggtccccttggcgtcccccaagatgccaagagcctgcggggtgcttctcagcgccagccggaacttgagcaggcacccctgcggaattctcagtcccacccactcagacgaccctcctccagccagagtccaccacagcccaccctaccctcttaaccctcgttcccgacctctccctacgagcgggccccggggagagagcgactgaccctagcgacagcccggcgggaggtggttgggatcttctccagggttcaaaagcgactttctgagccccaatttcctcagctttgcaattggtatagtttctgaaaggccattgctaaatctaaccgagataattcatggatatcccttgcacaatggttgagtattgagatctcaatagac

SEQ ID NO: 39674 - DNA, 1267 bp, Homo sapiens
  chr11:20690403-20691670
  binary
cgctccgcctcgaggaccccttttctgcacccccacctcagcgccctcttcctgcacccacaaagagagtactcagtcataggggttcaacaggagagaggagacagaaggtacaggcggtgagcagggactcagccatcatccccctcaggtccctccccacccagttgacagagcgaatcccgagtaattgttttccgagggggtccgtgcgcgctcggtggcgccgcctcggtctgggttcccccgaggaaaaatacccacccgcgagggctcggcggcttttcgactcggcggggatgaactgtggcaacttcggcagcccccaccgcggtgcggaagtaaagagggcaacattggcgactgcggctcggaggggctggagcgcgtgaagccgtgggggcgccgtgcgcctcccgctctctcgtttcggccgcaggtcctgggactccgacttcggtgctccgggtgatagcggctgcggcgcctgcagtccagatcctcgcagttctgcgggcgaaggaggcgaacggaatcggcccccagtggggagcgcaacaagccacagtagccaaaccccgcgctcctgcccgggctcccagacgaacgcagccgcagcggggggccgggccccgagccccacgccgccgccgccgcgccagcggtggggggcgggctgggggcggggcggccggggctgccttcccgggcgcatatgcgagcgcagcacccggcgctgccgagccacctcccccgccgcccgctagcaagtttggcggctccaagccaggcgcgcctcaggatccaggctcatttgcttccacctagcttcggtgccccctgctaggcggggaccctcgagagcgatgccgatggatttgattttagttgtgtggttctgtgtgtgcactgccaggacaggtaagcatgactgtggcggttagagggatccgggaaatgggggtgcccacagaccacggcggcgtggggagacctggagccgagctttgcgctggtctggggaacggcggtagcgtggaccggttcctgggatctctttgccctgctcggagtgacagggtgaaaatagggactcacgggcttgaagatgtccccgttgagtgccccttctcaggggacccggcctcaggggcgcaggagtgaggggcgcggccgagtaggcgcaccctcttgctgctagtaaccggctttccgtcccagggagtcgaaacccgcagcagggcgggcccgcgtgccccgagttccc

SEQ ID NO: 39675 - DNA, 591 bp, Homo sapiens; identical to SEQ ID NO: 28450
  chr11:2209823-2210414
  hypo

SEQ ID NO: 39676 - DNA, 988 bp, Homo sapiens
  chr11:27743487-27744475
  binary
cggctcgggagatttccctgtcgccaggtaagaaaaccttcgccttgtcaggctagggcgggaagaccgctggggaacttgttgcttatcagcgccggcagactaccgctttaataataataccagaaaagcgcagcagggagggggtggggggcggcaacggcgacgactaacctcgctgtttacgtgaccgactcactgtgactctctgggtaaaaaaaggaaacttcttagaaaagttcgtgcccctccccctcccccatcatgactaagggtctccagccgatgaggtcgtgagtgatgatcaaatggggactggggggaggggggcgagtaagtgacttgtccttgggaacatctgcatgcgtcgaagcgcgaaccagcccaacaactttcccttttcctcttaggtactgatgactaggcgagaggcaccaaggcgagccactagttgcccacaggaacctgtgtaagccgagctctcgagcggctgagttgaatgaagttatgactgcgtttgctctaatgggttatggcttcccaaatgtgagttaacagccccggtgcgcagctaggtcggaaggcgagccgcggagagcggagccgcgggccaaggcagggacgggaggggaggcggcaggttgggcgctccgctgctgctcggtgctgcttccccggagccgcttcctcatcctgcgggggctgccccgccgccggggtgccggggtgagcgcggcgggagccagggctggggtggcgaacctcggagggggctctcccaggaagccctgcggttagcgcccgcgcttccccaccagtggctgcgcaagctgggaagcgaagaggtcacgtgttggcggaaagtaacttggaggcgaaaggatgaactttgagaagaggaaaaaaagcacaatgaaacaaactacccccttggagtgtctaatagagggggaggcgggagggggggcggaggggcgccgctctccgc

SEQ ID NO: 39677 - DNA, 2442 bp, Homo sapiens; identical to SEQ ID NO: 30958
  chr11:31819317-31821759
  binary

SEQ ID NO: 39678 - DNA, 2436 bp, Homo sapiens; identical to SEQ ID NO: 30961
  chr11:31825604-31828040
  hyper

SEQ ID NO: 39679 - DNA, 559 bp, Homo sapiens; identical to SEQ ID NO: 33300
  chr11:32354840-32355399
  hyper

SEQ ID NO: 39680 - DNA, 236 bp, Homo sapiens; identical to SEQ ID NO: 29745
  chr11:3249619-3249855
  hypo

SEQ ID NO: 39681 - DNA, 763 bp, Homo sapiens
  chr11:40314522-40315285
  hyper
cgaagaatttggggagcaacttcccccccactctccatccttccggccggccccttcgccaaagatctgattagatttctcatcacaacccagtgcgcaattgaatttttgatttcagccacccggccagccaccttcccctctcccctccaaactccggttatatcctgtctccttccctccaccgcctctgcaatttcataatctcacgttaaatggagtgcggggggcgggggcgggggcgggggcggaggtagtggaggaaaatttcaaggctccgtcagctgtcaagaagaaacccattcctccccccgctactttttttttttctttttaaggctcggggtgcctttccttcctctgtccccgcccccacccccagcacccggtccagatcctccaggtgttgcagaactccgcggtcggggccgggatcacgggggagacgcaggatgcggtccctcgccggtggcccctgccagcccccgggtccccttctcctccatcagccggtagtggctccgggagcgccgaggtgatggaagttgagactggggcttttatttcaaatggggagggcgaagtgaggggacagacagggtggtaggcaaattaaaaaaaacacacacgaaaaaagaaagaaaaaaagaaaaagaagaaaaaaagaaaaaggaagaaaacgggtaaaaaaaaaattccctaatcgctggctcttctcatccttctcaaatgcaactgcagctttgatctcatttccagctgc

SEQ ID NO: 39682 - DNA, 994 bp, Homo sapiens; identical to SEQ ID NO: 26215
  chr11:43602804-43603798
  binary

SEQ ID NO: 39683 - DNA, 73 bp, Homo sapiens
  chr11:449604-449677
  hypo
cgtgtccgcaccattttcgcccgcccaatttcacgcgatcctgcgaaagaatgacccagaccggtccgggcgc

SEQ ID NO: 39684 - DNA, 351 bp, Homo sapiens; identical to SEQ ID NO: 23038
  chr11:45376873-45377224
  hyper

SEQ ID NO: 39685 - DNA, 677 bp, Homo sapiens; identical to SEQ ID NO: 27524
  chr11:57194101-57194778
  hyper

SEQ ID NO: 39686 - DNA, 50 bp, Homo sapiens; identical to SEQ ID NO: 17313
  chr11:57334786-57334836
  hyper

SEQ ID NO: 39687 - DNA, 614 bp, Homo sapiens; identical to SEQ ID NO: 23814
  chr11:60718609-60719223
  hyper

SEQ ID NO: 39688 - DNA, 120 bp, Homo sapiens; identical to SEQ ID NO: 21737
  chr11:63431997-63432117
  hypo

SEQ ID NO: 39689 - DNA, 197 bp, Homo sapiens; identical to SEQ ID NO: 15479
  chr11:63675233-63675430
  hypo

SEQ ID NO: 39690 - DNA, 63 bp, Homo sapiens; identical to SEQ ID NO: 21739
  chr11:63860763-63860826
  hypo

SEQ ID NO: 39691 - DNA, 940 bp, Homo sapiens
  chr11:64512349-64513289
  binary
cgcccccgcgccaggctgccccctcccccctccgcccctgcgcggagctccgcaccgccggctgcgccacccccaccgggggctccctctcgccccgcacgcggcggtccctgcggcagcttaacccctcccctgccgcgccgcccgggaggccagggccgcgggcggggggctgcgccactagctgccccgagggcgggcgaccggaggccccgccgcccgggacgcggaggggggaccgaaacgaagagcccctcccccaaccgcggacgccccagtgccccccgccctgcctgggtgtcgggcggaggaagccgggaggggcaggaagcggactgcggtggggaaggggcgccccgcccagcccccagctcgggttcctgttttcgagacaaaccgttcccatggggctaacccggcccgggaccgggcgtcttcctgcaggcagcgggtggcacaggcctagtggaggtcgggggcgtggggacagctggtccttgagatagtctgggggatgggctaggacaagatgggaatattttggggagagggacctgtggggagcgaggaatgaaatcgtggctatctggagacgcggccttgatgtctgggaatgggggcggggggcccagttcacacaggaggaacggggccccggaagcctggctccccacagggtcgaatggaaaggggcagccgcatgtggcggtgggttctccgcagctcggagactggagacctggatgcctggccaacagggaggaacttgggaggggcagccgcaggcggttggggtccccactagccgggcctaggagagcgggtaacggtttccgaccatttggcttcagacacactcactgtgaaaccaccgaccccaaacctcccttccgaggcgtgcccctcccagccttggggcgggggatccaggaccgccccc

SEQ ID NO: 39692 - DNA, 87 bp, Homo sapiens
  chr11:64578520-64578607
  hypo
cgtttcccacttccgcccgcgagatactctaacacgtgctaagagtagcttttgtttgtttgttttgagacacggtctttctctttc

SEQ ID NO: 39693 - DNA, 240 bp, Homo sapiens
  chr11:65192923-65193163
  hyper
cgtcagacttgcatacgcagcagatcagcatccttcgctgccccttagcaacttaggtggttgatttgaaactgtgaaggtgtgattttttcaggagctggaagtcttagaaaagccttgtaaatgcctatattgtgggcttttaacgtatttaagggaccacttaagacgagattagatgggctcttctggatttgttcctcatttgtcacaggtgtcttgtgattgaaaatcatgagc

SEQ ID NO: 39694 - DNA, 682 bp, Homo sapiens
  chr11:66410904-66411586
  hypo
cgtctgtttcttcaaggcaaacgaatgcacgtgcagttgtccaccagccggcttaggactgcgcccgggatgggagaccagagcggctgctatcggtgcgggaaagaggggcactggtccaaagagtgtccgatagatcgttcaggccgcgtggcagacttgaccgagcaatataatgagcaatacggagcagtgcgtacgccttacaccatgagctatggggattcattgtattacaacaacgcgtacggagcgctcgatgcctactacaagcgctgccgtgctgcccggtcctatgaggcagtggcagctgcagctgcctccgtgtataattacgcagagcagaccctgtcccagctgccacaagtccagaatacagccatggccagtcacctcacctccacctctctcgatccctacgatagacacctgttgccgacctcaggagctgctgccacagctgctgctgcagcagcagccgctgctgctgttactgcagcttccacttcatattacgggcgggatcggagccccctgcgtcgcgctacagccccagtccccactgttggagagggctacggttacgggcatgagagtgagttgtcccaagcttcagcagccgcgcggaattctctgtacgacatggcccggtatgagcgggagcagtatgccgatcgggcgc

SEQ ID NO: 39695 - DNA, 33 bp, Homo sapiens; identical to SEQ ID NO: 18259
  chr11:66658557-66658590
  hypo

SEQ ID NO: 39696 - DNA, 902 bp, Homo sapiens; identical to SEQ ID NO: 35352
  chr11:66885239-66886141
  binary

SEQ ID NO: 39697 - DNA, 353 bp, Homo sapiens; identical to SEQ ID NO: 23820
  chr11:69192459-69192812
  hypo

SEQ ID NO: 39698 - DNA, 250 bp, Homo sapiens; identical to SEQ ID NO: 33320
  chr11:72109417-72109667
  hypo

SEQ ID NO: 39699 - DNA, 224 bp, Homo sapiens; identical to SEQ ID NO: 30991
  chr11:72433395-72433619
  hyper

SEQ ID NO: 39700 - DNA, 56 bp, Homo sapiens; identical to SEQ ID NO: 21746
  chr11:73492566-73492622
  hypo

SEQ ID NO: 39701 - DNA, 461 bp, Homo sapiens; identical to SEQ ID NO: 24987
  chr11:76032911-76033372
  hyper

SEQ ID NO: 39702 - DNA, 118 bp, Homo sapiens; identical to SEQ ID NO: 10218
  chr11:77383112-77383230
  hypo

SEQ ID NO: 39703 - DNA, 1381 bp, Homo sapiens; identical to SEQ ID NO: 26231
  chr11:79149245-79150626
  hyper

SEQ ID NO: 39704 - DNA, 904 bp, Homo sapiens
  chr11:8040683-8041587
  binary
cgcagtcgcgcgtccccgccattggcagagccggagggggtcaccccccggggggcgaatggtacagtcctccgcccgcgcctcggccgggcccgcagcctgcgagccagccccaagcccagcgccgccgccgcccgcggagccccgagcggagccggaggcggcgatggagggagtcagcagccaccggaccctgtcttacagccgctggagctatgacaggtagggcgcccgaagggtggccctgcgtgagcgcctgctgaccctcgatctcctgcgggagaagcgggcctccgggggctaggactggcgcgagcgcccgacccccagggtgggcttgggcacccggaccctcgggcatccgggacccagagcctcgggtacggcgcagcggagctccagcgagggtagtgtccccacacccacggggcagagctgtcggaggagggcacgcggccactgggactagcgagctggcacctctgcccccaccccagctgccccgccagggtcgctccgccgggggaccccgagaaagggcgcggagggggcgccgggaggggcggggcaggggccggggtgggcccctggcgggcggggcgaggagggggcgccttcggctctgggatgcgcccgccggcgtctgcgccccgccggccctccgcagggaccgaggctggccccgggcggagtgtcccgctggctgccggggacccgcgagtcgctgcctgttccgcggggcgagatggcagcctgggccggctgtctgggcgcaggagcggcgctctcgagttgccaggctccgcgcccgccccgcggggatggcgagcggctgccggcgtgggcggtttggagctgcgctccccacgcactcgtcctggaggaaggagtcatcctcccaggc

SEQ ID NO: 39705 - DNA, 791 bp, Homo sapiens; identical to SEQ ID NO: 27535
  chr11:8189961-8190752
  binary

SEQ ID NO: 39706 - DNA, 240 bp, Homo sapiens
  chr11:84431446-84431686
  hyper
cgggctgcggcagtggcagctcgctgggggacccaaacgctgtgctcgccgggcacatggagcgacagcctagaccgagctgccgcttcgatcactgccccctgcacccgccgtggccatcccggagccccggtggaagcaacgccgcgggcaagtaccgagcctctcggggtctcccttccctggggaacgaggcgtgtggggggagggacagaaccaagaaagaatttttccccctac

SEQ ID NO: 39707 - DNA, 649 bp, Homo sapiens; identical to SEQ ID NO: 30995
  chr11:850444-851093
  hypo

SEQ ID NO: 39708 - DNA, 1998 bp, Homo sapiens
  chr11:91957644-91959642
  hyper
cgcggcaggaaagtacgttggtgtcatcctagagccccagagggctgagggaagactcgagctctaaaattagccgcttccaggcccggcgccgggaatgccctccagttcgccgcgcctcctccgccgccccctcccgcgcgccccctctcccctgcgccacgctcctagatcgctagtcatccccgccgccgaggctcctctccccctcgcccttttcgctcgcggtttgggaggaggagactgcgagagacaagcgcgagggggagactggagaggggcttggccgtgcgtcggcgtcggctgtgatggggagcccggagcagccaggcggcgagcagtagcggcggcggctgcagctcggagcagacaggagagccggcgctcctccccgcaggctgcgctgtgaactggcctgcggattgggatctcgcgcctcccgtccctctcctcccgctgctgttctcttcatctcggctcccctcctccgcttgcgaacccccggcggcggcggcggcggcgtcccgagcgcagagcgcttctgctcgcggcctcagtcccggctagcgcgcggtgggcgctgcggcggcagcagccgggggaccggctcgcccggagcaagagcgccgagcaccgggtgaagaagaccacgggggaggcgcctcgtagagccgtggatcgccagcggaggcaagggtgcgtggggatttgtagcgtgatgatttggctgcctggtgcaccgactggagcgcgcctgccggagcacagcctcagctgctgggtgcaaatgggctgcgaggtgggctggggaggcgagagccgacgaagcgcgtgggggaaacttttcaccttgtaaagttccaacctccgcgcagccccgagccgccgttgctaccgctgcaaacaggagaagagggtggcttggccccgcggcgggagccgggaggtttacacggagagttggccaagtttggggctgaggatctggggaggggttgcgaggggggttgcggatcagtgcacccatccccggctcccagccgcccctgcaggtggatgagaaggttcaggtggcgagcctgcttggcagccggtgcctctcgggcgcagtgggggatgttcagatgccgatggatgatgcacttaggggaccccgaggtgcaagttgggtcatcgctaggcgaggcgcggcgcagagagggagcccagcctccactttcgctaggaaagggaaagggttaccagtctgcgggtccgttccccacgcctgactcgggcttgcggggcttgtggtcagggtgagatgtagtgaacggcggcggcggctcttcgactggggacgacatcctttacggagtggttggggacagagactgtccctgctatcttgacaaggagagggaaccggaatgctttgcgagagtgcatgatttttggcgggcgtgtgggaaggctgcttgtctttgaaaagaaagcagcgcgggtctgaccatccccaggagtgcggaggagctgtctccggattgggggcgagaacgccaggggcaccagctccgagctcaggccccactcccgggcggttcgggacgaatcccctctacaggccagtgtgtgtgcagggcaagtgtagggggctgaggggcgctggcggggaggcagtagaggtggcctggaccatcttggcgcggcgcgcggtgagcgcgaggattccgccagtgggagtcgctgagctaaagtgcatctggccccccggcttgcatgatggcgagcccggatatttttagctgtgctgtgatctgaattccctcctctcctctctcgttgacttttgtcacatgtgctttccgagatggtttaacattgaacatgattgggctttgcggaaagcaacttttattcactttccaccgttctcctcttgtgggcggggggtggcgggggcgtgcttggggcaaggatgcaggggtggccggagtttggctgcgagctaagagagcc

SEQ ID NO: 39709 - DNA, 802 bp, Homo sapiens
  chr11:91959654-91960456
  hyper
cgggatgagaggaacaggggtgctcccggggtgtgggtgtgctggcggtgacatcctgaggctgcagctcgctggaataatgggctcaaaccaggcggtggagaggggtccccggaatggacgtcgggggcggggaggctgcggagaccctgcgaggtctccgtgaaggactaggaggggctcccgggagggagtggcgcctgcggcccggagcgtgggcggccggtggctctggcacgcggaatctggtggactcctagcgcctcggccgggagctccagctccatcccgccgccgccgcgcgcccaatgggactcagcttcgggtttgggcgaacctgcagcagccgcggcgggagggagggacgctgggaccgcggtaatgattgaagtctttttcccccctctcccctcctcccgctcctctccgcccccagactctggcgcgtttgttttccaagttggatcccacttccatttacaagtgtcagacaaacccgcgagaacctcccccaacccgccccggccccagccagactagggagggcgcccagggggagggggcgagctgtctgggcagtgcctggggaggtgcgacgcgcccacccggggcttgagcggctggggttcctgtgcgtgggtccttaatgtttaaaagatacacatgaacagcaacaaaacccaaaccactcgtggccacttgttttctgccgcttttctcccacttgcctcggacatattaattttctggccccgacgctagtcttttcaaaggcgagtccggggtagtgggaggaaggggc

SEQ ID NO: 39710 - DNA, 803 bp, Homo sapiens
  chr11:92930623-92931426
  binary
cgtgagtcacggcgcaggctcttgcgtctttgacgtgtacccacagggccccgccccactcaacacacacactcacccacacgcgcgcgcgcaaacacacacacacatattttaacgccctattcaggcctgggcttcgtctgaccaagttctcggggtcagataaccggttcctttgcggatgctgaccacggggtcagttagcaatcgggcctcaactcaggccaagcgcggggcccctggaggtgtgggcgcacccgactcccgcacagacccccgcccacgtcagccccggctccctgcccacgcacaacaccgacctagctcctcgcgcctcgccgccccggcagccgccggcgtcgccgccgcttccatctctcgcgggtctccaggacgccgccgcccgagtgctcactctcccgccgctgcgtggccggcgtcaggcccaggcctacctcccctgcccggagggacccgcgcctggtgcccgcctccctgccccggcgctccccaaccgcgcggcgaggagcatgcgcagtgggacagcccggctcggcgggcaccgccggcgaggggcgggaggggccgaagacccgaggactgctgcgaggccgggttgggtaacccgagaggagggttgggtaacctgagatcagcgagggtgggaccttagagctagccgagacccgggcccatagctccctgggggttttaaagatgacggcgaacttaaatttggggcgcctgtccgtatgcaaggcgttagcgttctgtaagtcaccttggagaatgcgaagaaggac

SEQ ID NO: 39711 - DNA, 68 bp, Homo sapiens; identical to SEQ ID NO: 15497
  chr11:9548334-9548402
  hypo

SEQ ID NO: 39712 - DNA, 229 bp, Homo sapiens; identical to SEQ ID NO: 21757
  chr12:101674003-101674232
  hyper

SEQ ID NO: 39713 - DNA, 807 bp, Homo sapiens; identical to SEQ ID NO: 23835
  chr12:104609351-104610158
  hyper

SEQ ID NO: 39714 - DNA, 969 bp, Homo sapiens
  chr12:104850999-104851968
  binary
cggcaccttccacacccctgcccgggctgggggctccgagagcggccgcgaagcgactccgatcctccctctgagccttgctcagctctgccccgcgcctcccgggctccggtccgcgcggcggggtccctgctcctgcgccccgggcgcgcttcccggacaccccggtccccgcagccaggacaaagccatgaagccagcgctgctggaagtgatgaggatgaacagaatctgccggatggtgctggccacttgcttgggatcctttatcctggtcatcttctatttccaaagtatgttgcacccaggtagggggcgcgttagcgtggttttgttggatattttcttctctctcgcgctctagctcgctccgcctgatttctgcctcttccaaccctacctctccgccttcggcctcttcggggctcctggctgcccagagctcctggctgcccagatctacccgggtcaccgcgtcgggatggggaggagaagggaaggtgtgcttcgccctcttcttcctaccggctccgggctggaggatgggaccaggaggggcggtagtttttttttttttttttttcttcttctttttttctttgtgtcccttgtctgtctgtctgcgaggtagcagggaaacggagaggtgtgggaagcaaccgggggtgaggggctggtttgaggagaacgaaactccctccctgctgctgccgaggtcggaggatgaaagagttacccggagccggctgctctgcgcccgggcgagccgcctcttcctggttgccgggccgggggcgaagggtgtacgccccggcgaggttgcgagtccctgcagcaggctgggagcccgggactgggctcccacgtgtcccgggctccgcgcagagctgagcaggtgtggagagtggtcgggtgcccagcgttgcccctccaccacgcgccggccgtttgcccccggggtccgggtcc

SEQ ID NO: 39715 - DNA, 211 bp, Homo sapiens; identical to SEQ ID NO: 21759
  chr12:105472684-105472895
  hypo

SEQ ID NO: 39716 - DNA, 499 bp, Homo sapiens; identical to SEQ ID NO: 24997
  chr12:111844290-111844789
  binary

SEQ ID NO: 39717 - DNA, 772 bp, Homo sapiens; identical to SEQ ID NO: 31007
  chr12:114273212-114273984
  hypo

SEQ ID NO: 39718 - DNA, 169 bp, Homo sapiens; identical to SEQ ID NO: 7862
  chr12:116394813-116394982
  hypo

SEQ ID NO: 39719 - DNA, 55 bp, Homo sapiens
  chr12:122204989-122205044
  hypo
cgtctggccattgatgcacctgctcctcctggagctcataaaataaaaaaaggcc

SEQ ID NO: 39720 - DNA, 123 bp, Homo sapiens; identical to SEQ ID NO: 18294
  chr12:122970391-122970514
  hypo

SEQ ID NO: 39721 - DNA, 112 bp, Homo sapiens; identical to SEQ ID NO: 21766
  chr12:123986845-123986957
  hypo

SEQ ID NO: 39722 - DNA, 84 bp, Homo sapiens; identical to SEQ ID NO: 17348
  chr12:124832004-124832088
  hypo

SEQ ID NO: 39723 - DNA, 156 bp, Homo sapiens; identical to SEQ ID NO: 21768
  chr12:12605374-12605530
  hypo

SEQ ID NO: 39724 - DNA, 183 bp, Homo sapiens; identical to SEQ ID NO: 21769
  chr12:130493339-130493522
  hypo

SEQ ID NO: 39725 - DNA, 285 bp, Homo sapiens; identical to SEQ ID NO: 33347
  chr12:132687990-132688275
  hypo

SEQ ID NO: 39726 - DNA, 806 bp, Homo sapiens
  chr12:132983184-132983990
  hypo
cgccgccctcgacatccccagcacagacgccgccgtcgacgttcccagtgcagacaccgccctcgacgttttcccagccaggacgccgccctcaacattcccagaggggacgccgccctcgacattcccagcaggcgcagctcaggagcaccttgccatctgcagctccctgggggacgagaagaaacagcagccacccctttctcgggcaccttcagctccgccgagaacgcccgacactcagagaccctgctctttgttaaatgggaatgagacatgacacagacgcggggcagcggccactgcagcacgggttgtccactgcccagctctggggccaaaccctcggcgtcgcgcaaaccatacctcccgcgtgacggccgtgtccggcctgctcacctgtgcgaggcagccctgcagagcaggtcaccaggccacaggagcaccagaagagaagccacgtccactgcgagggccatccggtgtcatgtccctgcctccactcagccccaggcccacagctgcagccacgcagccccgcacagcgtcaccgtctccaggatccatcggcagtggggggggccgtctcccacctccctcctcttacctccccccacctccccagggcacgcactccctggctcctgcgcgatgcccagcagggtccaaaatgcacctggatgcccgggagccgtcgtccgccccacaggcagccccaggagccatcgcccgccccaaaggcccccccgggagccgtcacctgccccacaggcccccccaggagccgtcgtgcgctcagtcgggtc

SEQ ID NO: 39727 - DNA, 695 bp, Homo sapiens; identical to SEQ ID NO: 27556
  chr12:132986274-132986969
  hypo

SEQ ID NO: 39728 - DNA, 500 bp, Homo sapiens; identical to SEQ ID NO: 16344
  chr12:133121644-133122144
  hypo

SEQ ID NO: 39729 - DNA, 1267 bp, Homo sapiens; identical to SEQ ID NO: 23049
  chr12:14927051-14928318
  hyper

SEQ ID NO: 39730 - DNA, 950 bp, Homo sapiens
  chr12:1905625-1906575
  hyper
cggtcataagcgggggagcgcagagccagttttcaattcaggagtgtctactctgaagccctcgcttcactccggagcccgctggctctatcctcgcaccgagcctttgcgacaagtgcacagggaacgctaaccccagccctcaacgctgcacagaacccggggtgaaacccgcgcagcacgacgcgcagggagtgggggagaagggagccccgatgccagcgccgcaggtgccgcactgttaaatggtgtgccacgggcccgggggtctagggaccgcctggcgagcggcacgtctggctgaggcgaccctcgaggaggccgccgcattcccagcgtgggggtcctcccgggcttgggtgcggggggtcagcaggagagacccttccgcgcggcctccctgcctccccggggccagggcgggttataactagcggcttccacacagcaggaagcctgacagaggctgcccgcggggctcccagcgacccgaggacatcgcacacttccggccttctcttctcacactccctctgccttccaagttctccccacgcagctcaggcgcgggcactggcaccgccctgggcaccgcctgagcagggctgggggagacccgccgaagggcccactcgcccagagacgccgtggggtcacggctgcggcctcggcggggtgggctcgacacacagggtcaggcctcgggaccacctctccccatcccggctgtcccggtccccagccgtcctgcccgcctcagaccgtccgcctcctgcgtgtctcctccactgaggacggcgggggaagaccccgggagcgtgggctctgcacttagacgcatcccctcctcccggctgtggagccgtttcccgggggttccggggccctgcccgcacttccgccttgccgagggcgggaggagtgtggcgggacgggcggcgccgccctgc

SEQ ID NO: 39731 - DNA, 997 bp, Homo sapiens; identical to SEQ ID NO: 26254
  chr12:22093966-22094963
  hyper

SEQ ID NO: 39732 - DNA, 221 bp, Homo sapiens; identical to SEQ ID NO: 23862
  chr12:29373882-29374103
  hypo

SEQ ID NO: 39733 - DNA, 271 bp, Homo sapiens
  chr12:34260770-34261041
  hyper
cgcctggctaggggcaggggcgccgccctcccgcggctccggagctggccaggggaagcgcccgcggggtccgggagcctggctacgcgtgtgcacctgctcctgccctcgccgtggcctctgccaggaccccgacgctccgccggaccctgtcctccagcgtggctgcggccccatggcctgcgacagccgccccgtccggaattcggcgccctccccggggcagaggccgcggcgtcctcaggctgtagcgccggcctgcgacccccac

SEQ ID NO: 39734 - DNA, 970 bp, Homo sapiens; identical to SEQ ID NO: 38068
  chr12:39298923-39299893
  hyper

SEQ ID NO: 39735 - DNA, 744 bp, Homo sapiens; identical to SEQ ID NO: 34249
  chr12:4273746-4274490
  hyper

SEQ ID NO: 39736 - DNA, 1469 bp, Homo sapiens
  chr12:4378217-4379686
  binary
cgggggtcgcgaccagtgatcgggatttcagtctgatctcagtacccagcggaacaggaccataacctaaagaaatgagctttttccggagcaaagagcggccccgatttcaaagtagaaaaaataaactgcttgggggtggaagatggcgaggggcggggggcggggagggaggcgggtcgcggcgctggctccggggtccgcggcacggcctcctctgccgcgctgcccagggcccggaccctgcccggcgctgcgcccaccgcgagggtgccagacccgccgcgccgccgccgcgctctcccagccgcggccccctcccccgccgcttcctcttgctctcccagccccttcccccacgtgtggatgacgtcaaaattccgcgaaaaagccgcgtggtggctccccgagcggaggcgcgattccgccgcccagcggccccctcccgggggcgcctggagggggagaagggcggaggcggccggttccttctcctcccgggaggcaggaccccccgacgccgaccgccggacgccccccgccccaaagcttattggaaaattcacttttgtaaagcaaatgtatttccagagctattttcggccgcgtgaggcgtgtcctaagctgaatcagacaggaagagggggaagttcgggtcttttaattttttttttttccgaagggaggggagtgagatgctaggtgggtgacagacggcaggcgctcgccttcttaactcacgcctgtcgcatctgccgcctcagtaatccagccccgtccaagccgaaattcgccgaagggagtgcggatgcacaggcctggcggactctgcccccctccagaacgcagcggcccagcgccccggcgggcgcggctgcgaccagagggtcccggaagcgagtgaacacctgcaatcgcactgcccgtccccacccaccctgctcccccgtgctctccgcttcccgacgttttcctcttctccttgtccgcatttttctactttgcctgcactccctccttcctcttgatgtgcctcctatgtgtcccctcggatttatgtgtcccctcgcattttgccagtcgggttttcggttttgattgaccgtccatccctccacggagaaacacaaacacagctccactctttgggggagccgaggggaaggcagtggctcccatttctgagcctgaactcagtcactacccgctccccacctggcctaggcgcccctgcgcggagaaggcgggactcgaactcgcgctgctcccgggccttgagccgaccgcggaatcacctggctgggaggcatcctccaggtaagcttgggagtatgtgtgcttagtgctgcaggctcctgcagaaaagtgcctataaacacccaacaccctgctgcaccctccacctccaggctttgtacactttccaaccgaaactccaaaacgctagcgtagagggtggggagccggcc

SEQ ID NO: 39737 - DNA, 1697 bp, Homo sapiens; identical to SEQ ID NO: 26262
  chr12:4382915-4384612
  hyper

SEQ ID NO: 39738 - DNA, 838 bp, Homo sapiens; identical to SEQ ID NO: 28514
  chr12:43944719-43945557
  hyper

SEQ ID NO: 39739 - DNA, 182 bp, Homo sapiens; identical to SEQ ID NO: 18313
  chr12:4672181-4672363
  hypo

SEQ ID NO: 39740 - DNA, 58 bp, Homo sapiens
  chr12:49989801-49989859
  hypo
cgaaatgtgacgatcacttagagaaacaggccattaggaatccattctcactgtgttc

SEQ ID NO: 39741 - DNA, 2657 bp, Homo sapiens
  chr12:5017995-5020652
  binary
cgggaggcaacggtggtgagaagggtggtcccaaggccgcgggaggagccaatcagcggcgactctgggctcttgcagcctccttagagactccgcagccctggaggtaccaagctgcctgctgccttttctcgcgctgcaggcgcggagatgcagcgcctctgggggcgcagctccagccgcactcgcagggcaaggcacacgcccccggctcctgctgccatgcgcctctgcgggggaccctttccaaataaattgcaagctttgaaagtggccctgtggaggcactaggctggggaaaaaggctgcgggaggagggacatagggtgggaggtgagtaggcgacttgcttctcagattattcccaattagcaccaagttggcagacaaccccacaaacccacgaagccttcggtcccccacaagtcacattccctgtatttcagaataatcggatcgtaagaaaacttcaagtcccatcgtaggttaaagagggacaggctcttagtaccgccgccgcccagtaaaactacatggaacaaacccagggatcctcatctgcacagctctgcccaaagtctgcagctctgcgagtccagccggcgggggaagctgggtgggccccgcagagagcaagggccttcttgggggaggagcgggatggggcgcagagcagtgcgatcgaagagggttactgtgggactgcacaaaagcaaacccgtcggaggagttttgccagaaacaccaccgcctgcattgcgtcggacctgaccatttccaatgtgaaattcccggggaaggtcgcgagccgctaggggccgttcgtgggcggggcggcgggccacaggggaagtagagttagcggtcggcttttctggtaggagaggaaaaagctgtgctggcaagggtgggaactgaatgacaaccccgctctcttccaaaccaccccctcatattttccatccacctcctcgctcctgccctcccccgccctccccaacccacgcccgggtgggccaatcgctgctcggtattccaggcgctttctcaggtttctgctgatcttgcagcgcccagaaatggaccgagcggacccgccgccgcacgcaccctgctccactccaagctcctaagggctcctggcgcgccgcgtagccttggcgaggtccgcgctggggtgcggagagcgaagggaactggagagccatgtagatccaggctctcgcccgcccgcctccttcgggatcgaatcaagggctcccatagtgttaggagggggcgagagtgctgtttatcgtcatttgcctcggagcttcgagagagggtggtattttgcttttccgccccgcatcctccggaactccctgcaccggagagaggacggcgtctccaggttgctggcaaccggtgagaatgggggtagggaaggaacattttcgccgtagctgctccgtaaagcgattgtccaactgagaggggcgtcggacgagtggaccagggcggcgagtttgcccggcgcgtctcggatgctgctgcggcggccgccgcggctcccgccagggcactgcaaagacgacctgccgcattcccactcgggctctccgctgactcagcaccgcccctgcgccaagccagccggccaggtagggggttccccagctcggggatgcagaagcgggggttggggggaccgggtgggggaggccgggggtgcggggatgctgtccgggaccctgagcttcccccggcgtctctcggcgcttttccgatctctagtttaacgaagttgtaaacagatcggctgttgggcattggggaaagtgggatggaagagccccaaacttggatttccgggtgtctgcgtgtcgtctgtccgtgtgtgtgtgatagccctagcaaacgtccagtgctttctcaagctagaggtctgtgttcttcggtgtctgtaggtccgtcccatctgaatgcttctgattttctacccccgtatcactttctatttctctgcagcgtgcatcgatcgccctggtgggagcttagaaggcggcaggcgaagaggggtaggaggggggagagccgaggagaagcagagagggtggcaggcgtggggatctgccgagccggcactgcaccgggtcctaggaaggctctcggaggggaggggaggccagggcgacccccgaagcaatggcccagtccgctagaacggcactgcgttaaggcacctgggatcaggaagaaatatctaaacaacaacaacagaaaaccaacaaacccccaaacccaaacccaaccctctgcaaaaagctgcacccggcccgcaggcgagggggattccaaactgagtgaaaggcagggtggaggggaaggcagcgagaggcaaagtcgcagatctcccgacctgctcgtgttgaagcacctccccctgggcgtgagggagacgcgcgctccggtgggggggccgcttgggtcccccccacccctggtccctggctgcttcccaccccgggctctctcctggcctcccacccccgcgcccggcttccaccatgacggtgatgtctggggagaacgtggacgaggcttcggccgccccgggccacccccaggatggcagctacccccggcaggccgaccacgacgaccacgagtgctgc

SEQ ID NO: 39742 - DNA, 598 bp, Homo sapiens; identical to SEQ ID NO: 25035
  chr12:50297476-50298074
  hyper

SEQ ID NO: 39743 - DNA, 525 bp, Homo sapiens; identical to SEQ ID NO: 23869
  chr12:51421158-51421683
  hypo

SEQ ID NO: 39744 - DNA, 95 bp, Homo sapiens; identical to SEQ ID NO: 33359
  chr12:51565439-51565534
  hypo

SEQ ID NO: 39745 - DNA, 501 bp, Homo sapiens; identical to SEQ ID NO: 25039
  chr12:52652140-52652641
  hyper

SEQ ID NO: 39746 - DNA, 211 bp, Homo sapiens; identical to SEQ ID NO: 23468
  chr12:53662999-53663210
  hypo

SEQ ID NO: 39747 - DNA, 114 bp, Homo sapiens; identical to SEQ ID NO: 13340
  chr12:54122178-54122292
  hypo

SEQ ID NO: 39748 - DNA, 194 bp, Homo sapiens; identical to SEQ ID NO: 9044
  chr12:54150983-54151177
  hyper

SEQ ID NO: 39749 - DNA, 136 bp, Homo sapiens; identical to SEQ ID NO: 15531
  chr12:56183329-56183465
  hypo

SEQ ID NO: 39750 - DNA, 166 bp, Homo sapiens; identical to SEQ ID NO: 21797
  chr12:56604107-56604273
  hypo

SEQ ID NO: 39751 - DNA, 210 bp, Homo sapiens
  chr12:64797272-64797482
  hypo
cggagtggcagtcaagtcgaggcagcctaagcctacactgcctctatgttgcattaataaattaataaatctgtgaccaaataaatgaagtgacatttagtagcatcgaaagatcccgtgagtaggacttcctaagaatgctctccttcttttcatggacaaaattttagtctgtttaaaataaattttggaccggacaccgtggctcac

SEQ ID NO: 39752 - DNA, 520 bp, Homo sapiens; identical to SEQ ID NO: 31060
  chr12:6483496-6484016
  hypo

SEQ ID NO: 39753 - DNA, 1861 bp, Homo sapiens; identical to SEQ ID NO: 34264
  chr12:65218018-65219879
  hyper

SEQ ID NO: 39754 - DNA, 928 bp, Homo sapiens; identical to SEQ ID NO: 25053
  chr12:6664180-6665108
  hyper

SEQ ID NO: 39755 - DNA, 143 bp, Homo sapiens; identical to SEQ ID NO: 23878
  chr12:69999239-69999382
  hypo

SEQ ID NO: 39756 - DNA, 270 bp, Homo sapiens; identical to SEQ ID NO: 23879
  chr12:79842622-79842892
  hypo

SEQ ID NO: 39757 - DNA, 312 bp, Homo sapiens
  chr12:85430024-85430336
  hyper
cgttcgtttcaatttagaatcgagattgtttgtccttctagagcacctgtagggaaaaaccggtgtctcttccttgtgattggctgttgccatggatacgctttgtgtagcggctatgggcgctgtcttacaacaaagccaaggaatctcgctgctgaggggtgagccggggtcttaagactgggattcccgttgagggaggtgaacagctgtgggagctcaggccgagccgggactctctctgcctggccagacttccagcaaagggagagaccgcgggtcaggggatggctgtgcgactctgcgaagctc

SEQ ID NO: 39758 - DNA, 1303 bp, Homo sapiens; identical to SEQ ID NO: 32544
  chr12:93966037-93967340
  binary

SEQ ID NO: 39759 - DNA, 801 bp, Homo sapiens
  chr12:95942177-95942978
  hyper
cgaagccctcgcccgcgcccgttctcccccagctcgccccctccagcccgctgcgccttgccgcagcatctccgggcactctgaggctgccgccgggacagggtcggagcgccgcagaacccaccgaaacttcccaggggggcaattcaaaattcgccggacgcgtcgccgccgcgcgcccctcggctcattcccttccgcgcgcccgcagccccaggctctccctctctcaggaccccccagcgccctgcgcggcgagaataggcccccaggtgcctcccggccccgggggctgccgtcgcacgtccgctcccgcaggggtcctcactccgccaatcgccgcggccgcgcgccctcgcgcacactcaccagcccgagccggggcggccatcttagcgctcaccccggccccccgccccccggttcggcggccgcgacgacccggtgcggcggctacgacagccgtgacgcgcagcaggccccgccccctcccacagccccacccctgcgccggctcttcgcgggcaccgagaacctgccggtggccgccttccgcgcctcgtgggggggtcggggccacggacggtccccggcgccgcaagtgggtctgcgcgaacaacaagcactgcctccccgggcgggcttcgcacctgtagtgccgtcgggacacgggagggtaaacccagcgtgtcctgtgtgcctgtgagccgcagaatcatccacggacgtcgttagtccttcctggaatttctgcgatttacacaacgtcgaattgtttggcagaaacgcgtggcaaactcc

SEQ ID NO: 39760 - DNA, 790 bp, Homo sapiens; identical to SEQ ID NO: 27593
  chr13:103046539-103047329
  binary

SEQ ID NO: 39761 - DNA, 1373 bp, Homo sapiens
  chr13:103052109-103053482
  hyper
cggaggaggaggaaacagatggggtgaatagaaacggtgtaagaactagaacacagggaggaggactcagggcagagcccagagcccactgcagcaccgagtccacggagcagccagaggctactaccagagcctcaattgccaccccaaagtaccagctgggggcaatcttctccgccccagcataggagcctctgcccttttagactgtctaacaactcgcagtttctcctttgctgcaggaatggtggccgcaaacggtctcagcctccgcacccaccgcctccgtccccgcccacccgcacctcctcctcctctgcctcgcgctgcacccgcaggcggcagacccctcggagcgcgccaccccagctacgttgcattggcaaggttcggaggctggagggcagcagccacttgctgccccagtcgctggggctctgggtgccagtgcggcccccggcagagcccagggcgtcagggaggccgtggagagccatgatctactgcaccgcagtgccagcgtcaggagcttccagagcccgggctgccactgcgggacggccgatctgcccgctccctccttcagacacaaccccagacaaaaacagccggccccgggtccctctccaccctgaacggagctaggggacgccacacactcccggctgccagcgtgagcggttccgggaaaggctgcgcccagcctcctcgccagcgccgccgccaccaccatgcagccctccagcctgcctcccctgggttgctcgcccacagctccgcggccgcccccaatcgcctcggactgagacgcggggacgggaacccctgggatccgactccccaaatcagatgcatttgcatttcttatgtaatgtactgcaagttcccttgttggagccctttggaatcggggcgcatgatcaccagtaggcttaaaagcaggaactcacggcctggctcatccccacccctggccctgtgggaccccgacgcagggctttgacaccgctttctaaagggggggacttcaattacaaatattagaggggctgggcttgtcctctcagtctggggttccctcccggcgcaagccttgctcaagtattcccggtggcaggatgtgtcagaggcagacagggggaatgagttaatgctcgggcacccggagctggacgggggagggacgcgggggctgacggaggagcggggccgcgagggagggggcctcttttactttggtaaaggtgatcgtggtggcgaatattgtgcaagctaatcagaaagtctagagcaggttctcggaacccagctacgtccctcgaacctgctgcagaagtaaggggagctcgcggttctttttcctggcaactacc

SEQ ID NO: 39762 - DNA, 181 bp, Homo sapiens; identical to SEQ ID NO: 21807
  chr13:110008382-110008563
  hypo

SEQ ID NO: 39763 - DNA, 119 bp, Homo sapiens; identical to SEQ ID NO: 27599
  chr13:111363839-111363958
  hypo

SEQ ID NO: 39764 - DNA, 95 bp, Homo sapiens; identical to SEQ ID NO: 15540
  chr13:111978023-111978118
  hypo

SEQ ID NO: 39765 - DNA, 831 bp, Homo sapiens; identical to SEQ ID NO: 34277
  chr13:112722879-112723710
  binary

SEQ ID NO: 39766 - DNA, 283 bp, Homo sapiens; identical to SEQ ID NO: 33374
  chr13:113107708-113107991
  hypo

SEQ ID NO: 39767 - DNA, 319 bp, Homo sapiens; identical to SEQ ID NO: 33381
  chr13:113797753-113798072
  hypo

SEQ ID NO: 39768 - DNA, 552 bp, Homo sapiens; identical to SEQ ID NO: 25064
  chr13:114122902-114123454
  hypo

SEQ ID NO: 39769 - DNA, 189 bp, Homo sapiens; identical to SEQ ID NO: 21813
  chr13:114193080-114193269
  hypo

SEQ ID NO: 39770 - DNA, 225 bp, Homo sapiens; identical to SEQ ID NO: 31079
  chr13:114271763-114271988
  hypo

SEQ ID NO: 39771 - DNA, 531 bp, Homo sapiens; identical to SEQ ID NO: 23469
  chr13:114497796-114498327
  hypo

SEQ ID NO: 39772 - DNA, 936 bp, Homo sapiens; identical to SEQ ID NO: 23895
  chr13:114748186-114749122
  hypo

SEQ ID NO: 39773 - DNA, 248 bp, Homo sapiens; identical to SEQ ID NO: 23897
  chr13:114776788-114777036
  binary

SEQ ID NO: 39774 - DNA, 130 bp, Homo sapiens; identical to SEQ ID NO: 21817
  chr13:114777587-114777717
  hypo

SEQ ID NO: 39775 - DNA, 96 bp, Homo sapiens
  chr13:114778712-114778808
  hypo
cgtccgggtcatctgcgggagagagaagcagggtgaccgttttcctcgggcacaatggcctcgtggggacaccatgccccggccccctgagggtcc

SEQ ID NO: 39776 - DNA, 188 bp, Homo sapiens; identical to SEQ ID NO: 27606
  chr13:114917508-114917696
  hypo

SEQ ID NO: 39777 - DNA, 366 bp, Homo sapiens; identical to SEQ ID NO: 23898
  chr13:20392340-20392706
  hypo

SEQ ID NO: 39778 - DNA, 341 bp, Homo sapiens
  chr13:23489683-23490024
  hyper
cggggggacgcggagcgatgcccgcgccggcgcaggggcggataaaaagccgtagcgccacgggagtgggcgggagggagagggggtacccgagggccacaagagtatgacggggctgtaagagctggtgtggcgggtgctgcccccctgctctgtctgcaccgcaagctcacctcctggctccgcgttcggttcggcacttggaactggatctggcgactgtgccggcgcgccgcctctgccgcggtcctagcgccgctcggcttcacgctccgcaagtcccaggcgtctgcaggaaccgccatcaccacccgcacccgcgccgggggtcgtgcctgccc

SEQ ID NO: 39779 - DNA, 733 bp, Homo sapiens
  chr13:25620914-25621647
  hyper
cgggtccagtgaagcatcagacacgctggcgcatggggacgaggagccctggagactcagggcccgtctggtgcggcccgggctttgctccgcgctcgccccctgcagctgccggggccgccgcaacttttcaaacctcaccgcaccgacagctctgtcccttcttttatctggagacgctgagcctcatcaactctcacctgcgtttcaggaaaaataataataataataaatgttccacggacacaggatttcggccaaatgctgcttagctctaccttccccaaaagggcgggaggggtggcaaccagtagcgaaaccccgcttgcctgtctcagcaactctcccacgtccgcaggaggccttgcggggatccgagcatcccgctccgagatggaagtggtaggacagtccgggagaagccgacgggaaactgtcctgggcgcgcaccgcccccgtgccctgcgccctcctcatttgctcggccagcgcgggacctcccagccgctgggcccgcgaccgcggcgaatcagtctccgcttccccgcccagcagagctcagatctgctctggagggctctcgggatgtcgcctttccctggagatgagcagttctgcgtcaccctccgtggccagcgcggcttccagggctgggctggtctattgtttgctgttcttgaaaggacgtggggagggtgggagggtgggagggtgggagggccggggctgagcc

SEQ ID NO: 39780 - DNA, 705 bp, Homo sapiens; identical to SEQ ID NO: 26311
  chr13:28544184-28544889
  hyper

SEQ ID NO: 39781 - DNA, 126 bp, Homo sapiens; identical to SEQ ID NO: 15558
  chr13:28745545-28745671
  hypo

SEQ ID NO: 39782 - DNA, 229 bp, Homo sapiens; identical to SEQ ID NO: 33391
  chr13:30123252-30123481
  hypo

SEQ ID NO: 39783 - DNA, 242 bp, Homo sapiens; identical to SEQ ID NO: 21824
  chr13:31002082-31002324
  hypo

SEQ ID NO: 39784 - DNA, 116 bp, Homo sapiens; identical to SEQ ID NO: 13380
  chr13:32983242-32983358
  hypo

SEQ ID NO: 39785 - DNA, 541 bp, Homo sapiens; identical to SEQ ID NO: 32550
  chr13:33000891-33001432
  binary

SEQ ID NO: 39786 - DNA, 532 bp, Homo sapiens; identical to SEQ ID NO: 33393
  chr13:37643604-37644136
  hypo

SEQ ID NO: 39787 - DNA, 707 bp, Homo sapiens; identical to SEQ ID NO: 25072
  chr13:43565935-43566642
  binary

SEQ ID NO: 39788 - DNA, 86 bp, Homo sapiens; identical to SEQ ID NO: 10292
  chr13:43620991-43621077
  hypo

SEQ ID NO: 39789 - DNA, 298 bp, Homo sapiens; identical to SEQ ID NO: 21830
  chr13:49879457-49879755
  hypo

SEQ ID NO: 39790 - DNA, 1110 bp, Homo sapiens; identical to SEQ ID NO: 25074
  chr13:53312858-53313968
  hyper

SEQ ID NO: 39791 - DNA, 73 bp, Homo sapiens; identical to SEQ ID NO: 21831
  chr13:60267291-60267364
  hypo

SEQ ID NO: 39792 - DNA, 1466 bp, Homo sapiens; identical to SEQ ID NO: 27620
  chr13:79169684-79171150
  binary

SEQ ID NO: 39793 - DNA, 218 bp, Homo sapiens
  chr13:84455524-84455742
  hyper
cgtgtaggtccccttctatctcattgcaggaacagatcttctctttgcaaacgtcccctgtaacgtttccagcggcaaaacaaagagacgtctccagcaacagaatccaaagcagcatttttaaagcgagcaattcatccccgatctcatcacaaagtaacagcgaccatcctgctcgccacagacacaattcaagttcatttagtgctccaatgtcc

SEQ ID NO: 39794 - DNA, 438 bp, Homo sapiens; identical to SEQ ID NO: 18362
  chr13:96085837-96086275
  hypo

SEQ ID NO: 39795 - DNA, 124 bp, Homo sapiens; identical to SEQ ID NO: 23915
  chr13:96409593-96409717
  hypo

SEQ ID NO: 39796 - DNA, 206 bp, Homo sapiens; identical to SEQ ID NO: 21835
  chr14:100751380-100751586
  binary

SEQ ID NO: 39797 - DNA, 774 bp, Homo sapiens; identical to SEQ ID NO: 25082
  chr14:103021331-103022105
  hyper

SEQ ID NO: 39798 - DNA, 365 bp, Homo sapiens; identical to SEQ ID NO: 15564
  chr14:103409913-103410278
  hypo

SEQ ID NO: 39799 - DNA, 421 bp, Homo sapiens; identical to SEQ ID NO: 23920
  chr14:103655241-103655662
  hyper

SEQ ID NO: 39800 - DNA, 910 bp, Homo sapiens
  chr14:103739785-103740695
  hyper
cgtgggcgggcgcagggccccggcggatacttggcagaggcttggggtcgtggcgggggcgcctcccttccggtgcgcgaaaaagcaaacgcgacgcgcgggctgcagagactgggccgggcggaggagacccccagcctgggttgagcggggcggatctgggactccgaggcttcctacgtggggcgggttcccagcggacgcctctgccgcacccctggcggggacccagctgcgccccttcccgcggccctcctagggcctgggtgcttggaggctcgaggccccaagatccatgtcgcccggaatcccggtgcctaggccttgtcgcgggccctgggaccaactcgcgggggtcaggagctgggggttgagagaaagatgatcaggtgggttggagaaaggagacgcttcccgctgggcgagtgagcccaggacgcggcagaagagggcagaccctaggggaccgccgcgtccccaggcgcgcacgcgacccctccccgcgccgaaaatcctctccccgcctcagtctccccgcctccgcctccccacccatagtgtcactccgaccctagccctgggtccaaacgggcaggagaggtcgctggtgcctccgcggtccccgccgcgcgcagaactcggccgagtgcaccggggtctcctggcctctgcgcgcagctggtcctgcagcgtcaggacccgaacgaccccgaggccccaggggctgggccctccagcagccccgcagcagccccgcagcagccccggcaggcaccctccagcggccgtgggcgcctggtagctatggaggcggtagaggtggaaaccaggcctctgtcttcacacaggaggaactccaggccctcgtttaggactccaggccaaaggctgtgtcagccgcgggtccccc

SEQ ID NO: 39801 - DNA, 365 bp, Homo sapiens; identical to SEQ ID NO: 25084
  chr14:104159892-104160257
  hypo

SEQ ID NO: 39802 - DNA, 1219 bp, Homo sapiens; identical to SEQ ID NO: 23926
  chr14:104617597-104618816
  hypo

SEQ ID NO: 39803 - DNA, 253 bp, Homo sapiens
  chr14:104636857-104637110
  hypo
cgtgaaaaatattggctctgaaatgagtctcgggtaatttgatttacgctgtagtggagaaatcagagatttcagcgcagagtggactgtggtgtcctccagcaggaaatggggcctgtctctggctctgcgttggagccctggttcagggtggccctcgtgtgcgcagcctctgccgggtcagagccgccgcctcctggcatcgacgcaccagacccacctgtgtggggtgtccctgctgtggatgggtttc

SEQ ID NO: 39804 - DNA, 825 bp, Homo sapiens; identical to SEQ ID NO: 23927
  chr14:104639065-104639890
  hypo

SEQ ID NO: 39805 - DNA, 657 bp, Homo sapiens; identical to SEQ ID NO: 23929
  chr14:104641166-104641823
  hypo

SEQ ID NO: 39806 - DNA, 805 bp, Homo sapiens; identical to SEQ ID NO: 33403
  chr14:104642056-104642861
  hypo

SEQ ID NO: 39807 - DNA, 1242 bp, Homo sapiens; identical to SEQ ID NO: 33404
  chr14:104643028-104644270
  hypo

SEQ ID NO: 39808 - DNA, 1156 bp, Homo sapiens; identical to SEQ ID NO: 33406
  chr14:104645553-104646709
  hypo

SEQ ID NO: 39809 - DNA, 492 bp, Homo sapiens; identical to SEQ ID NO: 23934
  chr14:105511981-105512473
  binary

SEQ ID NO: 39810 - DNA, 640 bp, Homo sapiens; identical to SEQ ID NO: 15574
  chr14:105687735-105688375
  hypo

SEQ ID NO: 39811 - DNA, 423 bp, Homo sapiens; identical to SEQ ID NO: 13401
  chr14:105689521-105689944
  hypo

SEQ ID NO: 39812 - DNA, 1221 bp, Homo sapiens; identical to SEQ ID NO: 34314
  chr14:23834171-23835392
  binary

SEQ ID NO: 39813 - DNA, 751 bp, Homo sapiens; identical to SEQ ID NO: 31126
  chr14:24803729-24804480
  hyper

SEQ ID NO: 39814 - DNA, 1304 bp, Homo sapiens
  chr14:29227666-29228970
  hyper
cgatatgatatgatcttaagggaccatctccaaaactgaaggagcagagaatgtgtaattcttttcccagtaaatccttccagttcctaggacaagactcaaacgtcccgctaggagctgcagctgcgaggtggagccaaaggctctgacaagtggcttgtgtatgacccaatatttatcaataacaacaacaaaatcaagtgaaaccaaggctgcggattttgaaatgcttctgcagccctggcgtggatatgcacgtgagcgaagtaaaagtcgctggagatgagttggctccacttgtccgccctggggagcaatcctggggcaaaatccagtgctaattgatcccaaccagccacattatcagctgtaaatgttcaaggggacaaagaatgagcattgtgtactaaagatactccaagcattttttcaagtaaatagggacgtgtaatcagtagcgtgtgtatgcatataaataggaaaagagaattatttttaattaattaggaaaataatgtttcatgtgtaattccagaattctctagcgtctcccactgtccgactgttttgtgattgggacttcctctaggaaaacctgcgggccctgttttgtgtttcgagcgggagagcagacactcagctcaaatagaggcctttctctcgtctttcggggtgtttattctatggccaaaaggtaagatggccaaggcagcgatctgagcgtgatgtctggccccgcggggggcccaggaggcccaagttgggacagctccggagctaccccggtgcccctcagctgggggagggcgcgcggcagccgcctgccagccccacaggctgctctccaaaggagctgggctttttcagcgtttctgtttccttgtagcctcatctatcttatctaacaagttcacgctccgggagaaaagaagagggtgagaaaaaaaaaaaagaaagaaaaaagaaaacctcttcaccgcggtgattcatagttcataggctccggagccaaacttgccgacccagcttttttctcgaacattactttctctcctacgtgccttaggacaaacccagaaggaagacactaaaattgccgaacaagaatctaggattgttttaaaaataaaagtgaccccccacagacacctttgatgttgttgattctgacacagaggagtcgagttgttttgtttacacatgctaacggtaacttgctcctgatgccgctctacgcgcagcttagtctgtcttctcctctcctccccgcaggcgactccttccaaagagcgagagagaaatac

SEQ ID NO: 39815 - DNA, 813 bp, Homo sapiens; identical to SEQ ID NO: 31129
  chr14:29229026-29229839
  hyper

SEQ ID NO: 39816 - DNA, 616 bp, Homo sapiens; identical to SEQ ID NO: 28563
  chr14:29247112-29247728
  hyper

SEQ ID NO: 39817 - DNA, 1091 bp, Homo sapiens; identical to SEQ ID NO: 23940
  chr14:36974427-36975518
  hyper

SEQ ID NO: 39818 - DNA, 868 bp, Homo sapiens
  chr14:38060563-38061431
  hyper
cgggagctaggaagtgtttaggacgggtctggaatacacaccttggtagtacgccggctccagggctgagggctcgatggggctcctggtggtcaccgaggcgctgcctagaggcaggctggcgggcaacgtagagccgtaaggcgagtattgcagtgcctgttcgtatgccttgaagtccagcttatgctgctgctccgaggaggacatgaggttgttgatggagaacgggtggttgaaggagtagtgggggtcccctttcaggtgcagctgggactcgtggggtgccaagccgtgtgccgggtgagaggcgggcacagaggccagcgccccgggcccggagcttatggggggcgcagttgaggaggctggagtcttcaactccgaggcgccccctgtcgccgtcgccccactgtggtccagagtctgggggctggcggcgggcccgggggccggcgcgccctctagctggccggtcttcccgtgcacaccccgatggaggggcgagtcggcgctggggttagaggcgccagaggggtccttgcggctctcagggccgcccttggcgccgctgcccccgcttccgctcccgcccccgccgccggcccccggctgcttctcgcacttgaagcgcttctggcggcgcaagtagcagccgttctcgaacatgttgccggagtccgggtgcagcgtccagtaggagcccttgcccggcttgtccggggagcgtgccaccttgacgaagcagtcattgaaggacagcgagtggcggatggagttctgccagcgctgctggttctgccggtaataggggaagaggtccatgatccactggtagatctcgctcagcgtgagcatcttgctgggc

SEQ ID NO: 39819 - DNA, 1332 bp, Homo sapiens
  chr14:38677154-38678486
  binary
cggaaaaactcgaatgtcgccctgccgttcctggggttggtgacaggtctggtcatcgcacggcggcagctcctcacctggatttagaagagctggcgtccccgcccgcccaagcctttaaactctcgtctgccagaacccgccaactctccagggtacaaagtacagcagggacgcgggtggagcccttccaagcggcgcagccttatctttcccgagtgaacacctaggtggattcccaacaccgcgcctggcacgtttctggagggagtctcaagctcctccagagctcccagctgcgcgtcctcgtttctgcagtcgatattcctgtgggagacacggggggctctgagcgctacgagctttattaagagatttgcgaatggttcactcaggtccctgaacactcccaatagcctaagctgcctgctgtgttatagcgcagaagcccctaacgcacggtggttgtcctttcttctcataacgctcgcagcttagggccagtttccgcgattctaagagtaattgcgtgggcacctgtgctggggccaggcgcaaagaagggagttggtctgcgcgaagatcgtcaacctgctaacagaccgcacatgcactttgcaccgaccatctacgtctcagtctggaggttgcgcactttgggtaaggagggcccggaacttccctggcgggtctgagctgcaaggcaagcgagggtgggaagagggaatttagggttctggactgcgggacgggagagaagctggggtctccagagaaaagggcagcaatggagggaaactgagatgaactccagacatccatgttcatggatccgtttgagtctttgctttgggtaggagaggagtggaatgagacagaatctatacctttggttcccacccgccctccagtaaggccgaggaactctcttggttcctctgagagcaagaggcagatggtgctgcgagggaaccccggaaggagccactaaagttgagcagagtgcaggactgggaaggaaaaaaatggggggcgggggggacaagccacctatgtgctctcctccctttctccaccccacccccttttttcgtagctgctgacgcgctggtggtgcctattaatcatttaccagtccagagccgcgccagttaatggctgtgccgtgcggtgctcccacatcctggcctctcctctccacggtcgcctgtgcccgggcaccccggagctgcaaactgcagagcccaggcaaccgctgggctgtgcgccccgccggcgccggtaggagccgcgctccccgcagcggttgcgctctacccggaggcgctgggc

SEQ ID NO: 39820 - DNA, 1549 bp, Homo sapiens; identical to SEQ ID NO: 31140
  chr14:38724165-38725714
  hyper

SEQ ID NO: 39821 - DNA, 317 bp, Homo sapiens; identical to SEQ ID NO: 21859
  chr14:39648098-39648415
  hypo

SEQ ID NO: 39822 - DNA, 1279 bp, Homo sapiens
  chr14:42075093-42076372
  binary
cgaaggtgctctcagtgtccgaagaccacgtgctggtgaacccacaatgagaagcgaaagggtttcaggactctagcagaaaggaagagcaagatttcactcagggtttcttagaagaaagagttaactttgctcactggcttttccaggatggagggagtggggatagggtcggggagagaagcattgggagtcttgtcggagtctcaagcaaaaccaggcgagggctccgggcagatccattcccgcagggccctgtctaacctcctttccagtcgcacctctttcctgctttagaccctgcgtctgtgccggtgaccttagagactaggtctggcttatgaagactgttgggctccctttctgcccttcacatagtaaaatgtgaccaactgcagtattcgtaatgtctgatgctgagctgagttgattcccaaatataaatgttcttttcagaatccgctcccatctgattagtaagcaaatcaccacccacaactaaggggacagcggaagccagcctcagatgactgaaacccccaagtcagtagctctcctcaaaatttccggcgggttattatagataatgacttttcccaccgccctaagcagccgaagcttgactcagtgatgattctctctatcccgtaactgcgaggaagtgggcgatcagcaaattgcccttttgcaggaggctggggacgcccctggaagttcgctttcattctccaggttttctgccttttcccttcccccttcctgcaacgcccccgcgcctcctcagcctggggatttcctggcgcttcgccggccctctccgcaaccccctgataaatcggttcagaaccagtctggctgggaggcccgagggctgacagcagcggagcggccccggccggggtctcacggactctcggggtctggccgacacggccgctcccgtcactgcagcgcgggctgagctcacggccgcgcgcccgccgccgccgccgccgccgccttcatgctgcagcgcagggctcagttccacgcggccaggaggccgccgttgcccacacgcgacgctttgggaagcccagctcccgggtccgccccggccgcggccgcagccccggacctcggctgcttgcctcgcgcctgaactgcggactcgccccagcgcggtggccagcgggcggggcgctgtgttccgcggcgcgcagggaggcggtgagcgtgtgcagagctgcccgaacggaggactatgtatgtgtgtgcgcgtgtttgcgtgtgtttgagc

SEQ ID NO: 39823 - DNA, 201 bp, Homo sapiens; identical to SEQ ID NO: 21860
  chr14:45431382-45431583
  binary

SEQ ID NO: 39824 - DNA, 1925 bp, Homo sapiens; identical to SEQ ID NO: 34323
  chr14:51560302-51562227
  binary

SEQ ID NO: 39825 - DNA, 95 bp, Homo sapiens; identical to SEQ ID NO: 21862
  chr14:53564384-53564479
  hypo

SEQ ID NO: 39826 - DNA, 988 bp, Homo sapiens
  chr14:54420542-54421530
  hyper
cgggagcgaggtcgggaaagtctcacccgcccaaagcctcaccaccgagaggcacttaaaaaggaaagcgcagagggaccctgcccacgcgcgtgtacacacacacccccccacacacacacaagcaaacacgagctccccgccacttcctccccagggtctcctcaaggccaaatattgctcccaatgacagccagtcaccccttggcgaacgcctgctaaggctccgaagagccgggccaccgatctagctcccggctgaaagcagccgaccttgtcacgcgcggggccgggaatgggagggagggtgttagagggtgatcgctgtgggaaagtgagagggagcggctgttagtcattgctccgggtccattaccgagaatccccaaacctagtccgccgctgcgtggcccctctccccatgcaaagcagacccccgaagaagccatgccaggctgagggacagacgccggggctcgaagctccgggcagattcagaaagaggcgtcgctgcagaaaggacgcatcacagttttcagatcttaatgtggccgaggttttacaactcccgacccggcgcagaaaggaaatcccaccatgttccccggagtcgagaaaacggtgaacagctttcggcctgcgctcgacctctgcgtctgcgtctctctcgcctcggcttcccttattttttaaaccaccaccacactccttcccccgccacttccttcccccacccccttcctccgttgcaccagcagcagagtcgcacgcagcaaatactccttcaagaattttacctacctacagttcaagcagttactgggatgtcctgactaatcgaagatgctgccgcgcgcgtgggtcgctctgcgcaagggcctcttcgaaaacccgactaggcgcaactcagcgttcagcagggccgggagcgccaggtcgtccccggggcccgggccccatgactcctgccccaaagcccactccaccc

SEQ ID NO: 39827 - DNA, 950 bp, Homo sapiens
  chr14:54421572-54422522
  hyper
cgctccggagctcaagaactcgggttgcctgccgccccactctccacgcacatacttggttttcttcttaggggcattggcaggtagactttgaggaagaaaagtaaaggatcgaacagctcagccctccctcccgaccgtggatgcccggagtcgaccaacacctcaggtccgggtgcggaggccgcgggcgcccctgcgcgaccgtccgcgcccggcaagagccgcgcggctttcgcctttgctggtcccgcgccaccgctggggcgggctgcgaaagggttgggaagagcaaagggtttttttgttttgttttgagacgcagaagccctttaaaaagcccggcgaggagaggtccagaagtagagaaagcagacggaggcaagctgtgcccgcggggcaaagggacagtagaaggggcgggcgcccgggttccccggaaaaccctcggccccaaggaatctcctggggcgggagagcgcggttctaaaaccgagaggataggaaggggaagggggagttgtgtttcaatttcggattcaccaggattcatctctagtcacatttttcttctcaaatttttaaatcgaaaagataaaagccaaaagaactttcatccccagagctttttattgggggaaaggaatgtaactcggggtggttgtccttcacttccctactcgaatcttctcctaatgccgaaatgtgtttacaggtagcctcagtttaccaagtatgtatcttttgggggtttaacctctcacaaagccttcaactcacaaaccgcgatccttggaaaccatcctccaaagcagtgcttggaggcctctaaggcccccggaccaactcccgctggaagaagcctgcagggactcgggaatcacgggaacctttcccgtcggttccgggcctggagggccaggaagagccgcgcgtccgcctttcgtccc

SEQ ID NO: 39828 - DNA, 839 bp, Homo sapiens; identical to SEQ ID NO: 25098
  chr14:55765300-55766139
  hypo

SEQ ID NO: 39829 - DNA, 918 bp, Homo sapiens
  chr14:57260878-57261796
  hyper
cgttaaaccagccgtctaaacgggccctggcactgggtatccgaccgctccacgcgccagctggtgaggcctggagttggaaccggaagccgtctccagccggcctcctaggccctaggtgcccgggtgggcacacttccgcgagggcccggggacagcgccggccaagtcttgcgggcaactgcacactcggttccgggaggcaggtactccaggtcgggagccctgaggccaagcctgtctcagttcccacgtcaagaggaagcctgggcttcggagcccaccctgcctggggccgcggtcccggagcgcggcgggaagaacgcccacgtcacctcccggtgttgttacacccacaatcaccacactctgacccccgcaaagaccacagaggagtaggaagagggctgccctcgtactccccaagccacccccgcctctgagcgcggaggcacgatgttctggggctcgagccttcgcatccaccgggccagcgctaaccaccggccgccgccctggaggggacccggcggccccgccacgtgcggctgcgagtttcagacccgcttccggggggcggcggccgtcggaggcctgggttggggggtcgtgagccggatgttccccgcagctggccagaaagctgcctctgagcctcttgagcaactccctgcctcctccggtagtctctctggactctccaagtgacttgctgggggcaccgggcgcggggagggcaggcccccggggtgacgcaggtgtgtactttacagccagagaaggcctagctttcagggacattggcttagtttgttgggtgagacgtgggggtggagaatgggagcactgtctctttgccaaattttccagagaaaccccgggactagctctgtccctggtgccccggctactgccagc

SEQ ID NO: 39830 - DNA, 930 bp, Homo sapiens
  chr14:57264733-57265663
  hyper
cgaggccaggagaagcggccccctcctaagccgtcagcggctcatcctaccgggagacctggaaaaccagcagccgcgggccctgctgggcttgctttcgccgccccggccccttctccccggccagtggaccccgctcgccgtcccgtctgtcagtctcggttttagctccttcgggcgcagggcgctcgcctcccggccgggccaccccaccctccaatccccgaggccgacccgacccctgcactccgccaggccgcgaggtttcccagcgaccggcgccccggcccgcggccgacctggaggcctgactgcagggctcgggcggggccctctctcggctctggctggcggcccactcccgcgggcgtacaggcctcgccaccgggcctcggccttgccgcggcccacagcgccctgggaccggcgcccccgaggcctgagaactacgcccggggggcgcgggctgaggctcaagagaggtcctaggtgcgggccagggatggagccagcccagagagaaaggggaaaacccggcaaggcaagagcctcagtctcgcccctgcctggcccgccaggctgtgagtggggcccattgggcagcgccaacctggggagtccggcgtctgccccagctgggggccctcggggcagagatgtgagtgctgttcccaggtaactccgactgggcactggggagttagaaaagccagctctttagccagagcgcctagggcgcggcggagagcgggccgcccggcaccacgttccttctggcagttccgccccagcctcccagcgtcttgcgcctgtggcggcggcagtacgggcctggggggtcacccacaggaaaggtgagattagcagcaccatgtgggagaggggttgaggaaacccaccattatctaaaacttggaggtttccaaagcc

SEQ ID NO: 39831 - DNA, 893 bp, Homo sapiens; identical to SEQ ID NO: 22800
  chr14:60385935-60386828
  binary

SEQ ID NO: 39832 - DNA, 788 bp, Homo sapiens; identical to SEQ ID NO: 34324
  chr14:60952157-60952945
  hyper

SEQ ID NO: 39833 - DNA, 834 bp, Homo sapiens; identical to SEQ ID NO: 26355
  chr14:62583679-62584513
  hyper

SEQ ID NO: 39834 - DNA, 882 bp, Homo sapiens; identical to SEQ ID NO: 23076
  chr14:65006715-65007597
  hyper

SEQ ID NO: 39835 - DNA, 567 bp, Homo sapiens; identical to SEQ ID NO: 23946
  chr14:65239277-65239844
  hypo

SEQ ID NO: 39836 - DNA, 875 bp, Homo sapiens; identical to SEQ ID NO: 23947
  chr14:70654358-70655233
  binary

SEQ ID NO: 39837 - DNA, 253 bp, Homo sapiens; identical to SEQ ID NO: 31168
  chr14:73174970-73175223
  hypo

SEQ ID NO: 39838 - DNA, 143 bp, Homo sapiens; identical to SEQ ID NO: 23951
  chr14:73602342-73602485
  hypo

SEQ ID NO: 39839 - DNA, 1055 bp, Homo sapiens; identical to SEQ ID NO: 35458
  chr14:73957523-73958578
  hyper

SEQ ID NO: 39840 - DNA, 1981 bp, Homo sapiens
  chr14:74706335-74708316
  binary
cgccccggccaggtgcactgggttcggcatccaggagatcctgggcttgaacaaggagcccccgagctcccacccgcgggcagcgctcgacggcctggcccccgggcacttgctggcggcgcgctcagtgctcagccccgcgggggtgggcggcatggggcttctggggcccggggggctccctggcttctacacgcagcccaccttcctggaagtgctgtccgacccgcagagcgtccacttgcagccattgggcagagcatcggggccgctggacaccagccagacggccagctcgggtaggtgaggagaggttgcgctgctgcctgactggggggcgacagccgggagccccgcgccgtcggctctcgcttgctggaccaggcctccaggcggaaaagttcctgccaggccgggggtcgccgcctgggccttgggccgacgcgcctggtgatggggcccgggaggatgcttcggcgtccgcagggtttcggccccaagcgtttcgggcggccgcgcagttctccagtccccgcgtcgggcagggctcggccacggcactctgttggagccccactgaaaactgggtttggggtgtcggagcccgtggtgcagagtcgccggccgtgtcggagggccccagcaccgctgctccactgcggccccggcctggtgtaggatccgcactcctcgagcccgatgctgttccggctccggccccatccctggtgtccaaagttgtctgattcccaaatcccgcgctggtcaactggggtttatttttcacccccacgagctcagacaacccggccatcgcggcagctaaagcggccgccatcctctcccacgtaagcgccactatatactggagcccggggacgcgcgggctcggggaccctgggtgacctctccgccttctccccgcgctgctttccgggaggtgtgtcgcggcccgctcgaacctccgattcctgtttgagcttggcaattcccccgatttttcgttgcgttttactttgttttacgtggaaaggcaacgaaaaccagcgcgtcgcaggctctcgggcctcgagtagggacgcattgtgccgccttgcgaaaaggacggtgctcggcagcccccagtcttcccggagcccagctccccacgcctccgctccgctcctcgctcctcgaggccaactttccggcccggggcattggggctggccgcgcagggcagggcgcagcagggtcgcgagcgctgccggggatctctgcggccccctaaggctgcctcgctctccgtcgtcccggtcccaagcgcgccggggcctttgcctctcttacaacgaaatctgttcaaaacctccggattcgggccccggcgcgggagaggtcagcctgagctcagggatgggacggccaccggggcgcccgcaggcttcctggggagacagagcaggtccccgccgctcgcggaggcagcccggggtggggccctcgcgggtttcgggcacagcggagcgcgtcccccactctgccgcatgtccctacgcccgcttttcagattctgaagatgtttcctccagcgatcgaaaaatgtccaaatctgctttaaaccagaccaagaaacggaagaagcggcgacacaggtgaggcccccgctttctgttacctctcctgcccgcgcaccccgctgccgtcccccgttccgggatcgggtctctcggaccctattttcgccgacaacggatctgaggtccgaggccgtgccagggcgcagaccacgggttgtttggcggaatctgcccgggggccttggcgtcggcaccggttgagcaggatgagtggccgccgggaaagcggcccggttcgggctttctcctccttgttcaggagaaaggaaaggctccaacacaggccaaactgagccacagagtgggggcggtccccagatccccgcaccagtacattctgagagccacacagacccggcggc

SEQ ID NO: 39841 - DNA, 742 bp, Homo sapiens
  chr14:88458946-88459688
  binary
cgacgctccccgactgccatctccgcgatgaagacagcctgtgccccactgcctgggacgagggttccagccccggctacttcactacttagacctgtcactttactctctgcacctatactctctggacctccggatcctcatttgttcaaacctaactgcctgtctggttcgtgttaaacgagaaagcacccgccccagccccgcagcgggcccgccccaaccgcctgctgactggcaccctaggggaatgcggcggagagtggagccggtggaaacgcagggcaacgccgcgggggcttgtggggctggccccacggggcgggctcttgccgccccccgcgtatccccgcagcttgccgctcaccccgccgccgctgaccgcgccgatgccgtcgaactcccggcccagcccgtcggagtcgtcgagcacgtacgcgccgccgggcgccagcagcgcacacagcagcaagggcaccgcggcgcggcccgccgaacccgcggccgcagtcatagctttcgctcggcgttgccaggaagccgagagtagccactcagccattgtgtgggtcacatgactccggcgcccagggaggcgggtcccgtcgccgccacgatagatacgggcaggaggccgctgatgctgacgccgccgccgccattttgagtgcgggtcaagggcctctgacgcagctggcggagtgttgagaaaagaagcagcgagctttttcttatcgctcgc

SEQ ID NO: 39842 - DNA, 82 bp, Homo sapiens; identical to SEQ ID NO: 15581
  chr14:89291884-89291966
  hypo

SEQ ID NO: 39843 - DNA, 1142 bp, Homo sapiens; identical to SEQ ID NO: 23955
  chr14:90849401-90850543
  binary

SEQ ID NO: 39844 - DNA, 145 bp, Homo sapiens; identical to SEQ ID NO: 21883
  chr14:91750824-91750969
  hypo

SEQ ID NO: 39845 - DNA, 224 bp, Homo sapiens
  chr14:97262663-97262887
  hypo
cgacaaataaacccccaaagctatgtaaactcattgagggacctgcgcaagtgaggtcctgaagcttacgcttcattggcttcattgttaatctccctctgcctgtgacttcagtgattttgacctagaacaatgacccagtgcccaataagctctcagcctcatgggtgatggagacttagctgattataataaacacaatgcggccgggcgcggtggctcac

SEQ ID NO: 39846 - DNA, 519 bp, Homo sapiens
  chr14:99736040-99736559
  hyper
cggctctcggccgcccggcagccagtcctctgcggtgactgggcgcgcagccctctcgagctccgcgcgggcagcccggccccagcccggcgaggtgcgcggcggattgcaagcatataacctgcccgcggtctcgatggcacccagaggatgttttatttctattgcagttaaaaaaaaaaaaaaaaaaaaaaaaaaaaaaaaaaaggaacggcgacccaggcaccgcgagagaaagaacggcggggaaatgttcgcgcgcagcgaagaagccgccccgcgggctgcggcgggcggggagcgccgcaaagccaccttcccggtgcaagtgtgcggggactcggggcgggttcccctgcaaacaccgtacctggcccgctcgcgctcgcttttcccctctgctaaataaacccaacagggacggtggaagctgctgcttgtcttgccccgctgcctgactttgcccgcccagccacatgcttgaaatcgacacgatttcagccggtggatttccactgc

SEQ ID NO: 39847 - DNA, 148 bp, Homo sapiens; identical to SEQ ID NO: 15585
  chr15:101464778-101464926
  hypo

SEQ ID NO: 39848 - DNA, 708 bp, Homo sapiens
  chr15:28341839-28342547
  hyper
cgttaagccaaacatcgtggctttccatccgttttctgttcttgtttgaaagagtacgcctccttccagcctgggaggaggggcggggcccgggagagggcctcgggaggccgcgggtgggctctgccgagggccgcgttcgcagggccccccgggactggcggccccgcggcaggccaggcgcacctctcggggagaaacgagcagcgccagcaaacgcgcagccgggcacgcggccgcccagccccgctcccagcccggggccaggacccctccccgcggcgccgctgccgcaagcctcctctgctaccccagctgcgggcagtttggcccggcgctgtgccgctgtagttcggtgtcccttcgcccatcctgcaggccagcttggaaactgtgtcccatgctcctcgaaacaccggacctgctccccgccgccctgcggaatgcgcctcctggcgcctcagtgggtggccgggccgagagcacaggcgcgccagccacacctccccacgggtcggacccacacggaccccgccgcgctccgccgaaactgcgcgggtcccgcgggtggccggcgcaagagccacagcccgcgacaagccggctgcctgcaggtcagtgacagaaccccaaatggaaactgcggaaacccaacaaccagcgagtgagctggtagagccagcggccccaaggagctgagggagctcc

SEQ ID NO: 39849 - DNA, 752 bp, Homo sapiens; identical to SEQ ID NO: 36356
  chr15:34806433-34807185
  hyper

SEQ ID NO: 39850 - DNA, 296 bp, Homo sapiens
  chr15:40423149-40423445
  hypo
cgattgttaataataattattaatattattcctgatatccagggggtcgaggatgacattgcttcctatacctcagaacacgtacacccccatgtgatgttgttcctaataaccagggggtagaggatgacgttactccaaatatcgccgtgggtgtacatcccttctgcgatcttgttgctaatacccaggcggggagaagacgatattaatcccaatattgcagaaggtgtagacctcccctgatattcaggggaaagagcacgatattgctcccaatatcgcagtctgtgtac

SEQ ID NO: 39851 - DNA, 1865 bp, Homo sapiens; identical to SEQ ID NO: 31195
  chr15:41786420-41788285
  hyper

SEQ ID NO: 39852 - DNA, 798 bp, Homo sapiens; identical to SEQ ID NO: 31196
  chr15:41952208-41953006
  hyper

SEQ ID NO: 39853 - DNA, 353 bp, Homo sapiens; identical to SEQ ID NO: 21892
  chr15:43622635-43622988
  hyper

SEQ ID NO: 39854 - DNA, 464 bp, Homo sapiens; identical to SEQ ID NO: 9153
  chr15:45722474-45722938
  binary

SEQ ID NO: 39855 - DNA, 1442 bp, Homo sapiens; identical to SEQ ID NO: 31203
  chr15:53078748-53080190
  hyper

SEQ ID NO: 39856 - DNA, 153 bp, Homo sapiens; identical to SEQ ID NO: 15594
  chr15:63066085-63066238
  hypo

SEQ ID NO: 39857 - DNA, 179 bp, Homo sapiens; identical to SEQ ID NO: 21897
  chr15:64674712-64674891
  hypo

SEQ ID NO: 39858 - DNA, 839 bp, Homo sapiens; identical to SEQ ID NO: 21898
  chr15:80215691-80216530
  binary

SEQ ID NO: 39859 - DNA, 927 bp, Homo sapiens
  chr15:88800412-88801339
  binary
cgcgctacccggttttgctgcaatccggaccgcggtaggaagtgaaatgaacgtggcggaggtgattggggagtgctcccaagccttgggtggggggcgctcccaagcctgggtgggtggggggcgcaggctcacggacggcgacggggggtgccggagcgcacagacaccccagagaagcacccagagccggggaccgggaccgcagacgcgcagtccttggtctgaatgacactcatttccgtaatctagagtctggggctctggtcttggctgggaggggactgcgggacatggcacgctaggtgccccccgtgcccgctgcgctttcttggaggtgggttttgcattcggccttgagcaggcatggatcggggaaggaagaaacaggggtcgaaagggctgcgctggagagccgaggtggccccgggcgagctgtgcgtgcaagagaaatggccgggggaaattgagatgcaaggggcatattttggcaagcgccacgccagcaccgtcagaggccggcttctcgggctcagctctcgggtgagctgagctggctgccgggtgagggggcgggcgggctgctttctccggattcgggggcgcagaacctcctccttccctcccacacaagcaccccttcctggtagggacgcaaagcaggtgcagctttcgacgagagctcagatctcatccgggaaagaagtgtgtgtggggggggccccgcttttgcgctggtagggatttttttcttaataaaacataaagatgccaagtgtgagctgtttgctgaaaaaaaaaaaaacgagcattcgctgtgggaaaggagaagaaagggttaggggagtccgagcaggcagacacactacagcattcacacgcagaagaaagcagggttctccttcccgagcttggaggagggcaggc

SEQ ID NO: 39860 - DNA, 757 bp, Homo sapiens; identical to SEQ ID NO: 21900
  chr15:94774574-94775331
  binary

SEQ ID NO: 39861 - DNA, 379 bp, Homo sapiens; identical to SEQ ID NO: 29910
  chr15:99459893-99460272
  hypo

SEQ ID NO: 39862 - DNA, 136 bp, Homo sapiens; identical to SEQ ID NO: 29915
  chr15:99506062-99506198
  hypo

SEQ ID NO: 39863 - DNA, 844 bp, Homo sapiens
  chr16:10276579-10277423
  hyper
cgcgattctcagcgctcacccggtcccatgatccggccaagccctaggagctcccctccaagatccctagctccgcttcctgccccactccggacggcaactgcccggtcctctgagcgcgccggagcaccctctccgcaacccagctccgggctggtgtgtttgagggcgagtgtgtgtgtgagtgtgggagcgcgctcgcgtgtggccggggatccccgcggtccccggccgagagaggcgcgggcggggaaaggcagctccctccgggcccttcgctgctgggccagctccgcgccgggcgttcggctccccacttcccagcgggagtccggtgagcgcctggacaccctggttcacagcactggcaaagccgggttcccggggcgtctttctgctgcggtcgcctccgaggaagaggagaaggaaggtagcggcgccctccacaccaacttagggacttgttctcagccggcgagacgcagtagcccccgctcaagcccaagaggcttcgagctccggcgggcgaaagcgtctcctgcccgcagcctctctcctaggtgggtcgagacagaccccgcagtccctcggcggcgacgcggagcgcggccacccgttccgagagcgcacggcggcaaataaggccaggataggtggctggctggcgacgggggcgcctgcggcggcgcgcgctgctgtccgtggtgttggaaccacgctctccgcccgctcccgggcgtctggtgcggctgaagaatcaattattcagatctctgctaccgcttcctcctcccccagtgcctcgcgctgggtacagttatccccctccacgcacaggcgcgcc

SEQ ID NO: 39864 - DNA, 117 bp, Homo sapiens
  chr16:1113830-1113947
  hypo
cggtgagccggcgtcgtggccacagccttcacactcccagccgctgcaggtccccgtttccgtacgtcacccagcgccacgcttctgcacccacgcagagccacgccccacctgtgc

SEQ ID NO: 39865 - DNA, 265 bp, Homo sapiens; identical to SEQ ID NO: 28610
  chr16:1154990-1155255
  hypo

SEQ ID NO: 39866 - DNA, 573 bp, Homo sapiens; identical to SEQ ID NO: 25125
  chr16:12132253-12132826
  hypo

SEQ ID NO: 39867 - DNA, 789 bp, Homo sapiens; identical to SEQ ID NO: 33440
  chr16:1248221-1249010
  hypo

SEQ ID NO: 39868 - DNA, 446 bp, Homo sapiens; identical to SEQ ID NO: 23988
  chr16:1250277-1250723
  hypo

SEQ ID NO: 39869 - DNA, 446 bp, Homo sapiens
  chr16:1251708-1252154
  hypo
cgcagttctcggagacgaagcagcgggagagtcagctgatgcgggagcagcgggcacgccacctgtccaacgacagcacgctggccagcttctccgagcctggcagctgctacgaagagctgctgaagtacgtgggccacatattccgcaaggtcaagcggcgcagcttgcgcctctacgcccgctggcagagccgctggcgcaagaaggtggaccccagtgctgtgcaaggccagggtcccgggcaccgccagcgccgggcaggcaggcacacagcctcggtgcaccacctggtctaccaccaccatcaccaccaccaccaccactaccatttcagccatggcagcccccgcaggcccggccccgagccaggcgcctgcgacaccaggctggtccgagctggcgcgcccccctcgccaccttccccaggccgcggaccccccgac

SEQ ID NO: 39870 - DNA, 370 bp, Homo sapiens; identical to SEQ ID NO: 31230
  chr16:12530018-12530388
  hypo

SEQ ID NO: 39871 - DNA, 233 bp, Homo sapiens
  chr16:1253065-1253298
  hypo
cgggggtgtgtcccccgtggtggggagaggtgcgagcgagggtgccgagggtgccgggatgctgtgtgccctcatgcgctggtacccagggcgtgcagacgagtgtcgggcgcatgctcctagcccttgaattgtgggagtccagccgctgtgtgttataagaggcacacgggctccaaagacagcacgaaaacatcacaggacggctcgatggtcattttcatgtcagtttc

SEQ ID NO: 39872 - DNA, 716 bp, Homo sapiens
  chr16:1270065-1270781
  hypo
cggtgaggccggtgacccaggggggctccctgcagtccccaccacgctccccacggcccgccagcgtccgcactcgtaagcataccttcggacagcgctgcgtctccagccggccggcggccccaggcggagaggaggccgaggcctcggacccagccgacgaggaggtcagccacatcaccagctccgcctgcccctggcagcccacagccgagccccatggccccgaagcctctccggtggccggcggcgagcgggacctgcgcaggctctacagcgtggatgctcagggcttcctggacaagccgggccgggcagacgagcagtggcggccctcggcggagctgggcagcggggagcctggggaggcgaaggcctggggccctgaggccgagcccgctctgggtgcgcgcagaaagaagaagatgagccccccctgcatctcggtggaaccccctgcggaggacgagggctctgcgcggccctccgcggcagagggcggcagcaccacactgaggcgcaggaccccgtcctgtgaggccacgcctcacagggactccctggagcccacagagggctcaggcgccgggggggaccctgcagccaagggggagcgctggggccaggcctcctgccgggctgagcacctgaccgtccccagctttgcctttgagccgctggacctcggggtccccagtggagaccctttcttggac

SEQ ID NO: 39873 - DNA, 78 bp, Homo sapiens
  chr16:14725786-14725864
  hypo
cgtattaataaatctgtataaataactgtttaatgggggcctggcgccatgactcacacctgtaatcccagcgttttc

SEQ ID NO: 39874 - DNA, 754 bp, Homo sapiens; identical to SEQ ID NO: 25134
  chr16:1730112-1730866
  hypo

SEQ ID NO: 39875 - DNA, 121 bp, Homo sapiens; identical to SEQ ID NO: 6947
  chr16:189550-189671
  hypo

SEQ ID NO: 39876 - DNA, 1490 bp, Homo sapiens; identical to SEQ ID NO: 34382
  chr16:2041061-2042551
  binary

SEQ ID NO: 39877 - DNA, 222 bp, Homo sapiens; identical to SEQ ID NO: 31239
  chr16:2106533-2106755
  hypo

SEQ ID NO: 39878 - DNA, 495 bp, Homo sapiens; identical to SEQ ID NO: 33449
  chr16:2106988-2107483
  hypo

SEQ ID NO: 39879 - DNA, 440 bp, Homo sapiens; identical to SEQ ID NO: 15617
  chr16:2108531-2108971
  hypo

SEQ ID NO: 39880 - DNA, 970 bp, Homo sapiens; identical to SEQ ID NO: 26426
  chr16:22824947-22825917
  binary

SEQ ID NO: 39881 - DNA, 1768 bp, Homo sapiens; identical to SEQ ID NO: 22807
  chr16:23846783-23848551
  binary

SEQ ID NO: 39882 - DNA, 594 bp, Homo sapiens; identical to SEQ ID NO: 21922
  chr16:27780854-27781448
  hypo

SEQ ID NO: 39883 - DNA, 384 bp, Homo sapiens; identical to SEQ ID NO: 25156
  chr16:31138407-31138791
  hypo

SEQ ID NO: 39884 - DNA, 2168 bp, Homo sapiens; identical to SEQ ID NO: 23095
  chr16:3220283-3222451
  hyper

SEQ ID NO: 39885 - DNA, 783 bp, Homo sapiens; identical to SEQ ID NO: 27679
  chr16:3355112-3355895
  hyper

SEQ ID NO: 39886 - DNA, 179 bp, Homo sapiens; identical to SEQ ID NO: 8027
  chr16:3811586-3811765
  hypo

SEQ ID NO: 39887 - DNA, 822 bp, Homo sapiens; identical to SEQ ID NO: 31267
  chr16:410895-411717
  hypo

SEQ ID NO: 39888 - DNA, 279 bp, Homo sapiens; identical to SEQ ID NO: 33466
  chr16:4203909-4204188
  hypo

SEQ ID NO: 39889 - DNA, 72 bp, Homo sapiens; identical to SEQ ID NO: 11186
  chr16:440413-440485
  hypo

SEQ ID NO: 39890 - DNA, 507 bp, Homo sapiens; identical to SEQ ID NO: 15638
  chr16:46683305-46683812
  hypo

SEQ ID NO: 39891 - DNA, 1626 bp, Homo sapiens; identical to SEQ ID NO: 34403
  chr16:54965796-54967422
  hyper

SEQ ID NO: 39892 - DNA, 477 bp, Homo sapiens; identical to SEQ ID NO: 25174
  chr16:56677120-56677597
  hyper

SEQ ID NO: 39893 - DNA, 57 bp, Homo sapiens; identical to SEQ ID NO: 21933
  chr16:58633220-58633277
  hypo

SEQ ID NO: 39894 - DNA, 962 bp, Homo sapiens
  chr16:62068832-62069794
  hyper
cgctggtggaggcaaacggctagtccttgacatgccgccggctccgtgcctgcgggggaagggtcaaccgcaaggaaactttgaggattctgccagactgggtgggggaaggctctggtgtttgggaggaataagcggaggaaattgtggatacctgttggcatcagcgttggcggcagcacgtttttttaccgtttcccagccttggctggatcctgggagaaccggagtaggtcccttatgaacctcttacgtactggcagaacctaggcaagagcctttttccctccgatcctgcgaggggcgcgaccagcccctcaaaggttcccggatgagaagcggccagaccacagaaagcgcaggtctgggctcagctgtccctaggagagcggctacggagtccccggcttaagggggcctccgtgcacgcaatctcgagttgcggggagacactgcctgggggtcctgcaggggtgctgggcagcgtcttggcgagggcagagccgcagggcgactccggagcccggcaagtttgtagcgggcaccgcacctcccagagctggagctgccacttgtgggaaagcctcgcgctggggctttcgcagctgagccttggcccgcagccctgccgcgggggtcgccctccctcgcctcggagatgaggcggtgcagaaaaccagccatagaccactcgggccccctcgcctccttttttccctggcttgcaccctccgcacagcgggctgcaggtgcttcccattcaccgcacggaccccgcagtgaaggcgcgcggctgcagccgcgcctgcctgcgttgggaagcggcgaaatagccaagtcgccgcagggaaggaaaccggcaggaaaactggaggggcacagcctggagcttgctactctctaggatctgttgtcaaagcagtttgcaaaaacagtcaggcaaaaccttgaggcgtacgtac

SEQ ID NO: 39895 - DNA, 111 bp, Homo sapiens; identical to SEQ ID NO: 18453
  chr16:69922460-69922571
  hypo

SEQ ID NO: 39896 - DNA, 1204 bp, Homo sapiens; identical to SEQ ID NO: 23502
  chr16:734744-735948
  hypo

SEQ ID NO: 39897 - DNA, 86 bp, Homo sapiens; identical to SEQ ID NO: 15647
  chr16:74984568-74984654
  hypo

SEQ ID NO: 39898 - DNA, 794 bp, Homo sapiens; identical to SEQ ID NO: 23503
  chr16:75148493-75149287
  hypo

SEQ ID NO: 39899 - DNA, 583 bp, Homo sapiens; identical to SEQ ID NO: 26452
  chr16:80574541-80575124
  hyper

SEQ ID NO: 39900 - DNA, 348 bp, Homo sapiens; identical to SEQ ID NO: 23099
  chr16:81779788-81780136
  hyper

SEQ ID NO: 39901 - DNA, 588 bp, Homo sapiens; identical to SEQ ID NO: 31301
  chr16:85517169-85517757
  hypo

SEQ ID NO: 39902 - DNA, 122 bp, Homo sapiens; identical to SEQ ID NO: 31302
  chr16:85617682-85617804
  hypo

SEQ ID NO: 39903 - DNA, 143 bp, Homo sapiens; identical to SEQ ID NO: 13554
  chr16:85618063-85618206
  hypo

SEQ ID NO: 39904 - DNA, 337 bp, Homo sapiens; identical to SEQ ID NO: 23505
  chr16:85670994-85671331
  hypo

SEQ ID NO: 39905 - DNA, 654 bp, Homo sapiens; identical to SEQ ID NO: 36431
  chr16:85683926-85684580
  hypo

SEQ ID NO: 39906 - DNA, 910 bp, Homo sapiens; identical to SEQ ID NO: 22812
  chr16:85932121-85933031
  binary

SEQ ID NO: 39907 - DNA, 198 bp, Homo sapiens; identical to SEQ ID NO: 38917
  chr16:87594891-87595089
  hypo

SEQ ID NO: 39908 - DNA, 195 bp, Homo sapiens; identical to SEQ ID NO: 24031
  chr16:88476105-88476300
  hypo

SEQ ID NO: 39909 - DNA, 751 bp, Homo sapiens
  chr16:88791422-88792173
  hypo
cgtggtccagccagggccgccaccactgcctccgtggcggggaggagccccctggactgtcgggccctgtggaggggcagggtgagcatgaggcagcagtcaagccaccaggaggggtcggggctgtgagtgctcccgtcttggagacaggataggtggagacagacacggacacccacagtgacgggggccgtgtggggccatggggctcagagcccatgtgcgtggacggacagtcacagggcggccatggggcctgccagacagagggtgatcatgcggacaggacaggcgggctgggagccctgtgggacgtcacatgggcacagacgcagcacacgccagcaggcacagacatgctggacacggggccctgggtgcccgactccagctgcactcacctggctccaggccggggtccttggggcccagggtgtcctgggggcgactgcggtccacccggccctgcctgtgcttctcctgcttggcacggatacgctccatcctgtggtggggaaaggtggggtatgctgagcattggggggaggagccggggagtccccgccccagaggcacctactgtcttttcagctgggccagggacttctcctctatcctgcggtgaaagtcaatgctcttgaggttggcagcgttgtagagggcgaagcccctgtagggaggcggggatggggtgtgagcaccaggcactcgaccccagcaacatgggcagccgccgctccccgctcagccc

SEQ ID NO: 39910 - DNA, 1388 bp, Homo sapiens; identical to SEQ ID NO: 31311
  chr16:88792758-88794146
  hypo

SEQ ID NO: 39911 - DNA, 426 bp, Homo sapiens; identical to SEQ ID NO: 31312
  chr16:88797394-88797820
  hypo

SEQ ID NO: 39912 - DNA, 1104 bp, Homo sapiens
  chr16:88802345-88803449
  hypo
cgtgccaacacaaggttgtctgtttattcagtcaacaaacgctcactgagaagctactctgggctggctctgggtgggcagaaggggacagacagacacatctgccttcttggcgctgccactcccccgggcaagtggacattgaacaggacgacaaccctgatgggtctgcgcacccaggcacccccggatgtggtggtgcacactcaccatggcaccaaggtccagacaggggtagcgggtgtgctccagccccagctggcgcaggctgacggggcccagggtggtgggcagctcagggcgcaggtccatggcccacacgtagcgtaggcagcacagcgtcatcccatacagcaggatgcagggcgagcacagcatggccagttggtggcggctgcgcaccgtccagatgaggcaggcccagagcagcagtacgaaggtcagccagctgtggtaggtgatgctccatacctgcgcggcagagagggctgcacagctgcccagcgcaccccacccaggcgatgccccacacctgcgcggcagagggggctgcacagctgcccagcgcaccccacccaggcgatgccccacacctgcgcggcagagggggctgcacagctgcccagcgcaccccacccaggcgatgccccacacctgcgcggcagagggggccgcccaccccaacccccacagccgcctaccatcatggcaatgagcgcgcacacatagctctggtccatgatgaggtggcccaggctgtggagcggagacgcctccctgggctcagcccgcttgggccgcactgcaggtggggacagcggtcagcttcggcaggttgatctgcaggcctccccaccctgactatgccctaaaatctgggccctgggcaagcacacagcaggagagacaggcccccggtgggctatgggcagaacacgagggctccggcaattgggctgacaccgtccctgagcgtcagggatggccctgccagcacctgccgttctctgggcctcactttccttgaaagggtgggaaaggtggccctgaccccctttccagctctgcgcacctgaagactctcaggacccccaccccagggcc

SEQ ID NO: 39913 - DNA, 629 bp, Homo sapiens; identical to SEQ ID NO: 24037
  chr16:88957365-88957994
  hypo

SEQ ID NO: 39914 - DNA, 741 bp, Homo sapiens; identical to SEQ ID NO: 28671
  chr16:88966221-88966962
  hypo

SEQ ID NO: 39915 - DNA, 160 bp, Homo sapiens
  chr16:88970438-88970598
  hypo
cgctgggccgtcatgccacggcgcaaggagtcaccacagccgtcacccaacaagggctcatggccaccacctgcgtgctcacggccaccacctgcgtgctcgtgacactctggatcccgaagctagagcagacagtgccctgccggcgccctgagcagtc

SEQ ID NO: 39916 - DNA, 335 bp, Homo sapiens; identical to SEQ ID NO: 24039
  chr16:89072478-89072813
  hypo

SEQ ID NO: 39917 - DNA, 378 bp, Homo sapiens; identical to SEQ ID NO: 24040
  chr16:89254530-89254908
  hypo

SEQ ID NO: 39918 - DNA, 516 bp, Homo sapiens; identical to SEQ ID NO: 27694
  chr16:89409913-89410429
  hypo

SEQ ID NO: 39919 - DNA, 107 bp, Homo sapiens; identical to SEQ ID NO: 21962
  chr16:89442354-89442461
  hypo

SEQ ID NO: 39920 - DNA, 625 bp, Homo sapiens
  chr16:894572-895197
  hypo
cgagctccaacatgtccacgggtgaacatcagcgtggccaccaccaggtccagagcacagtagaccctgtgccgccagtgtccgtcgccttccacacgtggccgcagttctgtgcatggggccgcccgccatcctgccgcctctgacctgggctgtgggctcgtgacacgtgtctgagctttccagtcgtggccgtgacgctctgtgcggaggctccgtccgcgtgctgcctccgtcccctctgccctggacggccactcactacctttgtctctcaccctgggggtttcatgaccccggagcctccacgtcctggtacagagcctgcctctccgggactgggcttcggccgagcagacaccgcctagctgctctttgaccagcgttctctgctctgcgtctggctggcatcggcggcttgctgagtccagcctggcatctcgctggcatcggcggctcgctgggtccagcctggcgctgacacgtttctgtgctcatttcattttacaaatcaactccccaaggtgaggtgggctcgtgccagcaggtgggagccggtcgtgcacgtctgcccagctccgtgctgagtgaggacgtgttgggggcttgaatcggagatgggggc

SEQ ID NO: 39921 - DNA, 494 bp, Homo sapiens; identical to SEQ ID NO: 21964
  chr16:89468462-89468956
  hypo

SEQ ID NO: 39922 - DNA, 172 bp, Homo sapiens; identical to SEQ ID NO: 21965
  chr16:89770184-89770356
  hypo

SEQ ID NO: 39923 - DNA, 170 bp, Homo sapiens; identical to SEQ ID NO: 25210
  chr16:9009875-9010045
  hypo

SEQ ID NO: 39924 - DNA, 65 bp, Homo sapiens; identical to SEQ ID NO: 21966
  chr17:1244981-1245046
  hypo

SEQ ID NO: 39925 - DNA, 194 bp, Homo sapiens; identical to SEQ ID NO: 15664
  chr17:1462644-1462838
  hypo

SEQ ID NO: 39926 - DNA, 827 bp, Homo sapiens
  chr17:15848582-15849409
  hyper
cgcgctgtacgtggcgctggagctggtcatcgccgcgctttcggtggcgggcaacgtgctggtgtgcgccgcggtgggcacggcgaacactctgcagacgcccaccaactacttcctggtgtccctggctgcggccgacgtggccgtggggctcttcgccatcccctttgccatcaccatcagcctgggcttctgcactgacttctacggctgcctcttcctcgcctgcttcgtgctggtgctcacgcagagctccatcttcagccttctggccgtggcagtcgacagatacctggccatctgtgtcccgctcaggtgaggcgctcggcgtcgcccgaactcggggccccgtcggagctccgaaatgggtcgtcttctccaggccggggttcctccctcgggggccccagacgggccaggctgggggcgcgcggggcgcttggagggctggttcccagcctggccaccccgcaacgctagaccagtgcgcccgggcacccaagacatcccagatgcgcgtcgctctaaggagatctgcgtagggacagctctagggggtccggggagtgcggtccccggcgcccggggaggcgccgtggaaaccccggggaaagcgtcacccccggggaaagcgtcacccccgtgggcgggtggagcccggggcgcgggagttttggtgatcacatctccactcctgccacgaaggccgttcctaacactcgcccgcagcggcggtgcagcggcagtcccgtgagtgctgcggctcccggaggcccgggaggttcccactaagggcaaggcaactttggacgctgggcattcgcacc

SEQ ID NO: 39927 - DNA, 1225 bp, Homo sapiens; identical to SEQ ID NO: 33499
  chr17:16283879-16285104
  binary

SEQ ID NO: 39928 - DNA, 121 bp, Homo sapiens; identical to SEQ ID NO: 21973
  chr17:17488209-17488330
  hypo

SEQ ID NO: 39929 - DNA, 363 bp, Homo sapiens; identical to SEQ ID NO: 21974
  chr17:18218758-18219121
  hyper

SEQ ID NO: 39930 - DNA, 361 bp, Homo sapiens
  chr17:1957353-1957714
  hyper
cggggcggaggcggagcgtgggccgcggagatccggcgttcgcaggaggcttggtgcgcggcggggctgcacggggccacttccggagtagtactgcgagcagcggcgcgacagtgcggggtcccctttctcccagaagagacgtcacccacacaaacctgaccttcacgtggggcgcgggaccttgcggggtcccagccgcaggcgcccctgttgtttccttcgggcgggtgggttggagaagaagtccacgcgggattcttcaaaacggcgtacagggggattctagggccccatggttacttctttggaccccccggaggcgctgtccagccacttccagtcgccctgatgactcgtc

SEQ ID NO: 39931 - DNA, 705 bp, Homo sapiens; identical to SEQ ID NO: 25213
  chr17:1958915-1959620
  binary

SEQ ID NO: 39932 - DNA, 101 bp, Homo sapiens; identical to SEQ ID NO: 25215
  chr17:2207862-2207963
  hypo

SEQ ID NO: 39933 - DNA, 71 bp, Homo sapiens; identical to SEQ ID NO: 24049
  chr17:2220974-2221045
  hypo

SEQ ID NO: 39934 - DNA, 439 bp, Homo sapiens
  chr17:27411553-27411992
  hypo
cgtcaaatacaatttatgtccgggctcatgtgctattagttaacggggagccgaatcacgggggaacaaacaaacggagacagaacggcgggggatattaattgtgtgtgacaaccaggctccagcggccctctatcactgttacacactattacatttatcattagctctcactgagtcctgtgcgctgccaccagcccatcctggccaggggagggggtccatcaggcgagagagagtgggggaagaaacccaatgccatgctaaaaaaaaaagacctctaaaaaacaaccctgtcgaacttgatggaggatcagcccgctctgcctgaaggcctgcgcatctgcatccgctgtccagctcccacccagaaagcgggaaaagagagggctggatttcctgggcttcctgccacctgacagtaccagcacaagcgccc

SEQ ID NO: 39935 - DNA, 249 bp, Homo sapiens
  chr17:28299355-28299604
  hypo
cgcgcccggcccaggcattttttaaatggattcctggctccttttaaaatggggatcactcacttgtgagctaggagtgctcataaatattgtgtagtcattgtttctaggcccttcaggactaaaacatataatttttagagtcaatgacccgtgaccagacatcacctgcagcctcttcaggcgtgccaccgctgccgggcctgctgtacgacccgcgggctctgggccatgcctgctcttgcgccc

SEQ ID NO: 39936 - DNA, 31 bp, Homo sapiens; identical to SEQ ID NO: 21980
  chr17:29112371-29112402
  hypo

SEQ ID NO: 39937 - DNA, 500 bp, Homo sapiens; identical to SEQ ID NO: 25221
  chr17:29335357-29335857
  hyper

SEQ ID NO: 39938 - DNA, 121 bp, Homo sapiens; identical to SEQ ID NO: 15671
  chr17:29773391-29773512
  hypo

SEQ ID NO: 39939 - DNA, 358 bp, Homo sapiens
  chr17:32483881-32484239
  hyper
cgccactagagacaagattaaaagcgagagcgagagagaaaatgcttaaaacaagtcgctgagcagctcggagcctgttaaccagcgcataatgccccatgttaaccatcctgggggatgtcagggcggccacgctgatgcactgcggtcgggcgcagcggcacagccttcagagccgccgccgctcggttccttttcccatgatgttttggactccgaatgccgtttctcgccgccggcctccgtccctcctctcctcctcctccaggcccccttttgtgggcagaattccaaatgccagcggccgctgctagcaccggggagaggaggcagcgcgcggcgcggagaggcgaggacc

SEQ ID NO: 39940 - DNA, 463 bp, Homo sapiens; identical to SEQ ID NO: 27708
  chr17:33775294-33775757
  hyper

SEQ ID NO: 39941 - DNA, 727 bp, Homo sapiens; identical to SEQ ID NO: 23104
  chr17:37321167-37321894
  hyper

SEQ ID NO: 39942 - DNA, 912 bp, Homo sapiens; identical to SEQ ID NO: 21984
  chr17:37618442-37619354
  hyper

SEQ ID NO: 39943 - DNA, 135 bp, Homo sapiens; identical to SEQ ID NO: 28693
  chr17:41278562-41278697
  hypo

SEQ ID NO: 39944 - DNA, 100 bp, Homo sapiens; identical to SEQ ID NO: 21985
  chr17:41672281-41672381
  hypo

SEQ ID NO: 39945 - DNA, 627 bp, Homo sapiens
  chr17:42030245-42030872
  binary
cgggtttctggggtcgggagtgcgtatgcaaatgacgtgggcgtggttggcagatctcccaggaggcctcaggggtcctcaccacaggtctgggccctccgacctgcggaagcgaaggggaaggaattggatctggggaggcgagcctgggagacgtcgttaagtgatgttgccagggtagggccaggccgcgctctcggatgcaggatgtgtggtaacgggcgcttttaccgcgacctgacggggcggtcctcgccgtcggggaagaacgttttggaaagaagcgtgtccgggccgtctcttttcccatacctgggggcggggaagggaagagcgtggtcagatctggccacgcccccaggtggagcggggccgcagggtgagagccccaggggtcccgctccgcgcctgcgctcaccgctgccgggtgaccaggttgaggtagtggcgcagggaggcgtagtagcggttcagctcctccggcgaggcgtcttcgcggggagcctcgggtttgatggggtaggcgtcgaccagcgcccctaggcagacgagcagggccagaagcactgtggtcaaggcgggccacggcctgcgcacgaacaccatctgggaaggcgacattgggac

SEQ ID NO: 39946 - DNA, 2121 bp, Homo sapiens
  chr17:42081919-42084040
  hyper
cggaccccgccccgaccaggtccagccccgcccaacggcaagttaagagccccccagtgccagacgctccagacagactgccactcttggggggcaagagttggttgtcgtcatggcgacggcgctgatggctgtggttctgcgggcagctgctgtagccccgaggctgagaggccggggaggcactgggggcgcccgaaggctgagctgtggcgcgcggcggcgggcggcgaggggcaccagcccggggcgccggctcagcaccgcctggtcgcagccccagcccccgcccgaggagtacgcgggcgcggacgacgtctcccagtcgcccgtcgccgaggagccgtcgtgggtgccgagtcccaggcccccggtgccccacgagtccccagagcctccttcgggccgctcgctggtgcagcgggacatccaggccttcctgaaccagtgcggggccagccctggggaggcgcgccactggctcacgcagttccagacctgccatcactccgcggacaagcccttcgccgtcatcgaggtgagcggagcccggcgtgggccgtgacgcagcgaggggatggggttgtgcggccacctgtcctcaggcatggcaggatacgctgcgggctctgcgcagcggaagcgggaaggagcccggcagggcccagaccagcgccgccgggaatgggagaggccgtaagctcctccggaagcctcccgcccagcccgagtgaggatcctgggggaccccacccgccaggtgtgatgctctgaagaaggcccccaacatgggcgcagttaggggttcagaaggacctggacaggagccgcttgcactgcccctcccccaaagatgtcccggagtccaaggtcggagggaggagggcgggaggtaccccagcgtgagacaagggagtggcaagacccaacggggcaaagggcggagcaggtgggcactggtggccagaactgggtcctgacagcttctggaagggtagggtcaccgagacggccctgcaggccaggctgtgggagccagcggctcaggtccgtgtcacgctccttgaaagcccactcctccgcaggtggacgaggaggtgctcaagtgccagcagggcgtatccagtctggcctttgccctggccttcttgcagcgcatggacatgaagccgctggtggtcctggggctgccggcccctacggctccctcgggctgtctttccttctgggaggccaaggcgcagctggccaagagctgcaaggtgctggtagacgcgcttcgacacaacgccgccgctgctgtgccattttttggcggcgggtctgtgctacgcgctgccgagccggctccccatgccaggtgagtgcccgccctgcccgcccaggcgtcctcagagcgtgctactctgcccgccctgccccgtccggcaggcctggagggggccctctcgagcaccacgtctggcccacagctacggcggcatcgtctcggtggagacagacctgctgcagtggtgcctggagtcgggcagcatccccatcctgtgccccatcggggagacggccgcgcgccgctccgtgcttctcgactccctggaggtgaccgcgtcgctggccaaggcgctgcggcccaccaaaatcatcttcctcaataacacaggcggcctgcgcgacagcagtcataaggtgcggccctttctttcaccttcccccacgccggcgatccgggccttctcttgcgcccctcgcacttctccccgacgggccgcagactcactagcaagccgggtgggtagaaaagcctaagggagtataggggaggagttcagccctgggtgcccagatctgcgccctccctggctaaggactccgggcggaagtaaggataaaggggtcagagaaaagagaggtccgtgggggtaggggggcagtccgtgccggctgtgggccaggctcacccgctgactccggacacaggtcctgagtaacgtgaacctgcccgccgacctggacctggtgtgcaacgccgagtgggtgagcacaaaagaacggcagcagatgcggctcatcgtggacgtgctcagccgcctgccccaccactcctcggccgtcatcaccgcc

SEQ ID NO: 39947 - DNA, 815 bp, Homo sapiens; identical to SEQ ID NO: 25238
  chr17:42091712-42092527
  binary

SEQ ID NO: 39948 - DNA, 326 bp, Homo sapiens; identical to SEQ ID NO: 21992
  chr17:42097490-42097816
  hypo

SEQ ID NO: 39949 - DNA, 225 bp, Homo sapiens
  chr17:43001707-43001932
  hypo
cgagccaggtggacgggtgttggcagcagactgcactggacttaagcctgtggggattagcttggagcctcacctaagacctgggggccactaagaaggcagaactcctagcaacccaccgccaaggccgtagaagggtggaacagacctccaggtgcaattactcccaaacccacggagaagaggaggccctttagggcgtattgggctgtgaagtgaagagcc

SEQ ID NO: 39950 - DNA, 1190 bp, Homo sapiens; identical to SEQ ID NO: 24069
  chr17:46795376-46796566
  hyper

SEQ ID NO: 39951 - DNA, 1436 bp, Homo sapiens; identical to SEQ ID NO: 26486
  chr17:46801836-46803272
  hyper

SEQ ID NO: 39952 - DNA, 1406 bp, Homo sapiens; identical to SEQ ID NO: 25251
  chr17:46824276-46825682
  hyper

SEQ ID NO: 39953 - DNA, 1263 bp, Homo sapiens; identical to SEQ ID NO: 25254
  chr17:46829437-46830700
  hyper

SEQ ID NO: 39954 - DNA, 634 bp, Homo sapiens
  chr17:4981385-4982019
  binary
cgcgcaaacggtccccgcgggaatgcgaagcggattctcgagttcttgagcctagagcaatgcttggggagcgacacgagggcgcagagcggcagatcgcggagcggaagttcatccccggagccgttctaggaaacccggaggactcaggtcgtcaatgattccggggctgaagtgggcatcgacgggtgcactttgctgttccagggagccggctcggcaggcggcggcgacgtggaacttgggctagggctagaaccggcgaaaagcaagccggaaaaggcaagggggcgtcggtgcgctgaccacctgttcctccagcggagtgcgacgcgcgccgattggctggagtgccgcccgggtaccggaagtggccgatgcccgtcgccagtgacaccgggacaacagctgcgggctctgtgcgagcggcccagcagcgcggagcctcagcggagtgagcgagcgcggggcagtagcggcctgcggtgagacctcattccgtcgcggctgtgggggtaggcgggggctgggctcccagctccctagagagccgagcggaaaccctacgtttaggcccgttctgaccggggttcgctgtgtgaccttgaagtttatgcctccctccattcccccc

SEQ ID NO: 39955 - DNA, 144 bp, Homo sapiens; identical to SEQ ID NO: 24075
  chr17:57297033-57297177
  hypo

SEQ ID NO: 39956 - DNA, 713 bp, Homo sapiens; identical to SEQ ID NO: 25258
  chr17:58498618-58499331
  hyper

SEQ ID NO: 39957 - DNA, 910 bp, Homo sapiens; identical to SEQ ID NO: 25260
  chr17:59531682-59532592
  hyper

SEQ ID NO: 39958 - DNA, 738 bp, Homo sapiens; identical to SEQ ID NO: 24077
  chr17:61777761-61778499
  binary

SEQ ID NO: 39959 - DNA, 523 bp, Homo sapiens; identical to SEQ ID NO: 24078
  chr17:61926187-61926710
  hyper

SEQ ID NO: 39960 - DNA, 110 bp, Homo sapiens; identical to SEQ ID NO: 31379
  chr17:66434339-66434449
  binary

SEQ ID NO: 39961 - DNA, 1383 bp, Homo sapiens; identical to SEQ ID NO: 32668
  chr17:70113240-70114623
  hyper

SEQ ID NO: 39962 - DNA, 216 bp, Homo sapiens; identical to SEQ ID NO: 35567
  chr17:71201635-71201851
  hypo

SEQ ID NO: 39963 - DNA, 181 bp, Homo sapiens
  chr17:71202346-71202527
  hypo
cgttttcacgccacacctcaacagcaaccttcatcgcctggtgcagcgaacttctgtgagtcaaatcaaaaacatgcttagtgcgaacgaagcgatacaggctcaaataacaaaattaacctgctcaagcacgtaatactccaggatgcagcatagggaggggaataagacacaaatagcc

SEQ ID NO: 39964 - DNA, 973 bp, Homo sapiens; identical to SEQ ID NO: 25266
  chr17:71948405-71949378
  binary

SEQ ID NO: 39965 - DNA, 441 bp, Homo sapiens
  chr17:72277763-72278204
  hypo
cggcactcaggatttttttttaatgcggatgcagcttctggacaaattcctaggatctccccaccaccccttgcttcctgccccaaccagattgagaacctggagctgtcctggcaggacctgtggagatagggaaggggccggtggggtccctcaccccacaccctccctctgccccccagcagccggcaccatggagattgtgtacgtgtacgtcaagaagcgcagcgagttcgggaagcagtgcaatttctcggaccgccaggccgagctgaacatcgacatcatgcccaaccctgagctggccgagcagttcgtggagcggaacccagtggacacgggcatccagtgctcgatcagcatgtcggaacacgaggtgggtccctgccccaagggccctggcctgtcaggtgtggccaggcagggcggccagctggggcc

SEQ ID NO: 39966 - DNA, 968 bp, Homo sapiens; identical to SEQ ID NO: 24081
  chr17:73584153-73585121
  binary

SEQ ID NO: 39967 - DNA, 959 bp, Homo sapiens; identical to SEQ ID NO: 24082
  chr17:73615737-73616696
  hypo

SEQ ID NO: 39968 - DNA, 264 bp, Homo sapiens; identical to SEQ ID NO: 20338
  chr17:74387398-74387662
  hypo

SEQ ID NO: 39969 - DNA, 136 bp, Homo sapiens; identical to SEQ ID NO: 9265
  chr17:74620111-74620247
  hyper

SEQ ID NO: 39970 - DNA, 605 bp, Homo sapiens; identical to SEQ ID NO: 27739
  chr17:76227764-76228369
  binary

SEQ ID NO: 39971 - DNA, 195 bp, Homo sapiens; identical to SEQ ID NO: 33532
  chr17:77084533-77084728
  hypo

SEQ ID NO: 39972 - DNA, 409 bp, Homo sapiens; identical to SEQ ID NO: 37322
  chr17:77216290-77216699
  hyper

SEQ ID NO: 39973 - DNA, 578 bp, Homo sapiens; identical to SEQ ID NO: 35579
  chr17:77786288-77786866
  hyper

SEQ ID NO: 39974 - DNA, 210 bp, Homo sapiens; identical to SEQ ID NO: 28734
  chr17:80333059-80333269
  hyper

SEQ ID NO: 39975 - DNA, 748 bp, Homo sapiens; identical to SEQ ID NO: 24101
  chr17:8055144-8055892
  hyper

SEQ ID NO: 39976 - DNA, 82 bp, Homo sapiens; identical to SEQ ID NO: 22017
  chr17:80600131-80600213
  hypo

SEQ ID NO: 39977 - DNA, 467 bp, Homo sapiens; identical to SEQ ID NO: 24106
  chr17:81062114-81062581
  hypo

SEQ ID NO: 39978 - DNA, 439 bp, Homo sapiens; identical to SEQ ID NO: 22019
  chr17:8197565-8198004
  hypo

SEQ ID NO: 39979 - DNA, 258 bp, Homo sapiens
  chr17:8731961-8732219
  hypo
cgggacacgccgggcagcatttccccatccccactgggccggcctgtcctccggtgcagccctgggggcccgtcccagctgccaggcatcaagaagtccaggggccatgcacgcttcttgatgccccctttgcgctgcagcccggctcgctccatctcagggctgccgggtgcaggcagctcatcagcccccgtgggaaggtcccgctcaatgccgctgtcagtggacagcacagaaacccgggccaactcccggtcc

SEQ ID NO: 39980 - DNA, 784 bp, Homo sapiens; identical to SEQ ID NO: 31408
  chr17:9143010-9143794
  hyper

SEQ ID NO: 39981 - DNA, 514 bp, Homo sapiens; identical to SEQ ID NO: 25289
  chr18:10589052-10589566
  hypo

SEQ ID NO: 39982 - DNA, 1576 bp, Homo sapiens
  chr18:11148402-11149978
  hyper
cgccgctggcctcccgaatcgaaccccagagcaccagagcccttcactttgttaagaagtcccccacccaggcgcccccctcgtcctcctcaagtgccctcggaaagcggaccagactcacctactgccaggcagatgggcagcagcagcctgaagatgagcccgcacaccacttctgaggccatcgcgtcggtccggcgagtcggagcagaggggcgaggctcgagggtccctaggggtggtgggacgcaaggcccatgcccgtctatggcctctcgccgccggcagctcgcagccacccgagcatcgcctcggcgcgggccgcgacgctctccgccccgagggcacgctcccggggctcttggccgcccctcgcccaccgggctctgggtagcccctcaccaggctcttggcggccacctagcccggcgcccggccccctgcggccggcccatttagtgtgaatcctggatccggcagcggcggcggcttcttcaggggtagctgatgccggggccttggagagggacgctttgggagggtcctgggaggcggcgcggcgagcaaagggggcaagaagggcgtgctgtgctcccgcctggctcccggggcgtcgtttgggggcggccggggagttttctacttggaagcccctctgaagccaccgcgtctcctttgcccggcctcgtctccgctgcccacgcaggctgccgcgctctggcctcggccccggctctcggagctgcccggcgggctccgggtctcgccctccagcccccaggcggcccgcggcggatccccgagaggcagcgcagctcagcccctgcgccccccagcttcgggccggagagaccggggtgggagctgccaggcgcgcagaaccatccccgccaccacggggctcgccttgtgggtccggtgcgcgggcggcgctgcgagtccctccctcactcgaaggaacggcgcgagcgtggggagaaatggagaccagagcgcatatcgggtgagtgggtctcccactccctcctccaccgcctcaatttaaaactcaagagaaaaaccagcgccgtcccgtcgcccagcgcgaccaccgcctgccgccttgcagcctcgccctcgcggcgcagccggggctccccggcggcgcgcgcttctccaccttcaatgaaactttcgaagccctcactcggggacgggcgtgtcccccggccaatgggatggcggctccggggcctgcgcgcgcggagcccgcccctgagcggctggggaagtgagagccttgcaccggcgcggagggcaagcccccacccgcggctcccgcgcctgggagagacccggcctggcctgccagtgggctgcgcgccttggctcgccctccgcgggcactcctgccccactggctcccgcagccccgcggctctgcgtggttctgtcattccggtggtgcaccctggcatccagtccacccggccgggccctgagcttgcccaaacccagggaaccgtttaaggtccgagggaaacgcacaggcccggcaggagagaagccaggggcttggagagtcctgtgcgacccc

SEQ ID NO: 39983 - DNA, 125 bp, Homo sapiens; identical to SEQ ID NO: 26521
  chr18:12375948-12376073
  hypo

SEQ ID NO: 39984 - DNA, 133 bp, Homo sapiens; identical to SEQ ID NO: 25291
  chr18:13135171-13135304
  hypo

SEQ ID NO: 39985 - DNA, 340 bp, Homo sapiens; identical to SEQ ID NO: 15714
  chr18:13442504-13442844
  hypo

SEQ ID NO: 39986 - DNA, 646 bp, Homo sapiens; identical to SEQ ID NO: 26527
  chr18:20911034-20911680
  hypo

SEQ ID NO: 39987 - DNA, 785 bp, Homo sapiens
  chr18:28621489-28622274
  hyper
cgcgagaccagactcggctcactgccgacgcgggtatagacctcgctcccatcggaccccatgcgcatccatggatgcgggtaagtcgcgggtccgcggctcctttctgggcgtgcggaatgaaactctgttgaagcctgaagcttcgcgtgtaaccgcgccgccagagttccgaacacttcaagtctcccgtgttctcagagcatcgtctctaacttcctctcctagaggatttcgtcctgggcggcaggtttccgtagactcgaaaccccaggctgtgctccggccgcgcagtcctccccggagccggagtaagtacgacgcaaccccaccgcatccatcatcccccaccactgtcaccctctacccgcctccacacctcggcagcatccccaaaacacaacacgaccccaacccccattctggcccggtcttcccacactttcgcgcccccggcacatcccgcccccagctgggtggctggcgggggtggaccgcttgggtgagcttctgaataccctttaggggagataccgagaaacccacttctcaggggcagccccaccaagggacccagggacacagccccggctccactcactaacgaaccaatccgggtcaactgcgacccagagctggggagggggcagcccctaaatcccttttcaagtctgtgctttgagctctcagggatcctctccacccaaaggcgccctccaaccaccatcaccaccagctccaccacctggggagaagcgtgaatcccaaccccctgcccaacccgc

SEQ ID NO: 39988 - DNA, 907 bp, Homo sapiens
  chr18:32073526-32074433
  hyper
cgcgggggtggagggggtccgtgtgccgggcgaggagtgggcgcgaggccgggctgccgcgctgcccccggccgcccggtgcagaggagcccgccgcggggcgggaggtgcacatgacgcgcagccccggctgcgcagggaccgcagccgcccacggcgccggggcgcggacacaggcggctcggcgctggagcaagggcaggcgccgcgcaccgagcaaagtcaagagtggaagcgggcggagagcgccggcgggggcagggattcgcctcaacgcccactcacggggttcccacctgtgcgccggcgccggccgcggctagcgcgaagcatgtgccgggcgccgcagccaggactgcggcgcggcgcctccccgggcggcgggcggcgcctcaggcccgcggggcggcggtagcggctgctgcaggatgtccggcccgggggcgcggggccgcgcaggtaaatctcccccgccctcgaaggccttcgcagcgccgcagcccctgctgctgccgcggcgccgctcggggggtggctatggcagccggctccttcgcgtcgcgggttgagttgttttcgttgtggtcgctgccctcttggtcatcctctcgggctgagctggtgggaggtggagtgtctacctccattagggatgatactcacgtcggggaacagtctgaggggtactgactgggacatccgcgttgggttcctttgcagccagcggcgtcctttcgtgttgcagtgcactgcggtgcccgggccgatgcctgggtgggagtgggctccgggccccggggacggggggcggcgggggcgggtgggcacgggggtgagtgtcttcggcttttatagcctgttgcccacttcgaagttttctgctggacagagggcaggcgggaggttc

SEQ ID NO: 39989 - DNA, 906 bp, Homo sapiens
  chr18:32557542-32558448
  binary
cgcgctggcgctcgcgcgcttgggagcatcccctggaccccgggcacttccccttcggcagccaccactctcccactccgacgccggccaccatccgcgctcccgggactcaggagccgggtgggtgcaaaaggaagcgggttgttattctgcgcccaagcatctcttctgcagggagccccgggagcgcagggcgagggctactcagcgacttcgcactcggcttagtgggaaattcttcggtctacccttagaagggctatgcggaagccagaaatcccacaaagagccaggagaggggtggacgcggaaagcggtcccctctgaacctggggcgctcgataaagctgattttcagaccccaaaagggctagtgggtttggtcactcctccagtgacttcgtcaatacagtgccaagggcagagccgtaacctcggagaaggggcgctgcagccatttgatcaggagaagcctttgtcttaacccccaagcccctcctgctagtcctcgctgggtcagtagcgctgggagtaattaatattacgaacattagcctttccttcacctccgcaccagccaacactgctgtcccctccctgattgtcttctctatcacttgttcacatctccttttccaaaaaaagaagaacaaaaggaaaatagtgtagacccgctaggcaggaagaggtcactaaaaatactatcgtgctgtcaatgtagaatgaagggttaagcgctcaaacccgcgcccgcgcgcaccgaaacggaagaacttccttgattagcatagtatcgaccctggggccgcgctgcgaggcggaggttcggtcccagctggggtgaagtgtgcagaccggttgcgattgtggtcagacgcagcacctacttctaatctgaggacccgc

SEQ ID NO: 39990 - DNA, 936 bp, Homo sapiens
  chr18:35145982-35146918
  binary
cgtttaaacaggctggaccggttcaagttcccagccagaccaggggtgggggtggcgagtgtgcgcgcgcggaggagggcgcggggggccgggaatgggcgcgctgtgggggcccgcgccacggcgggcggcggccgggggcagggcggcgtggggcggcggccaccgcgcctcccccgtcggcggccccgcgccgtggcgatggtacagtccgagacggcccccggctataaatagcgccaggcgcatggctcttcgggaggcgctgagattccgggcccggcggccgcggggagcgggtgtccgtgaggagccgggcagccggcctcctctctttgccttttgggggttctttttgtaatagcagcaggtgcaactttttgtattttaaaaatagtgatttttattttcgtgtgggtatgtaggggggctttatccaccaagctatgctctattagggcgccaggcgggcgaagcaaaggcagggatggcgggcggggcggcggcggaggtggaatgggcgcttttttcttccatctggctttatttatttatttagactagaaaagcgagccggcttggagggagtccgcccggggatccgagcgcgcattcatcagtgtcgagagaaaaaaagctacataaatatatattatgtggataaatctatagacaagagctctctcgcgcgcgctctctccctgtctctctgtgtgtgtctttctctgtttttttttcctcctcgcacccccaacctgccagagcagccccacatcttcctcccgcccggcatctaccgccacccaagccacctgccaggatggggctgggagctgtcgggccgcgccggggggcagagggacggggagtagagactcggggtccgacccccgccccaacccgcttccgaaggcggaaggtgggggtccccgtccc

SEQ ID NO: 39991 - DNA, 185 bp, Homo sapiens; identical to SEQ ID NO: 15717
  chr18:3580794-3580979
  hypo

SEQ ID NO: 39992 - DNA, 241 bp, Homo sapiens; identical to SEQ ID NO: 15718
  chr18:3581880-3582121
  hypo

SEQ ID NO: 39993 - DNA, 1197 bp, Homo sapiens; identical to SEQ ID NO: 22822
  chr18:44335955-44337152
  binary

SEQ ID NO: 39994 - DNA, 620 bp, Homo sapiens; identical to SEQ ID NO: 23117
  chr18:44337479-44338099
  hyper

SEQ ID NO: 39995 - DNA, 822 bp, Homo sapiens
  chr18:44787716-44788538
  hyper
cggtctctcctcgcgccctgcttctcggcttagcttgctcagatccgcacccccccactccccacctcagacctctctgacgccgcctgttggtcaggcagggcagggcgaggagcgcagcgccagccccagccccatcaccccacccttcacccctccatgcccagtggtcgaaggaggacagatatgaggcgagggctggaggcctagtaattgaagtaggaccaggggcaggagggagcaatccgccctgggggcgcgcagcctgggccggcagcttgaactcccttgccagaagggttgtcccaggacgcgcaggtgcgcttctcctgtgccgccctagggcagtccactaggagggggcaccatttccacactttcccggggaacgaccacctgaggtgagatgagaacctattgtgcgtctccaggaggggagctgggaagattggatacggaagactgagcccttctcagcatctccaggaaggaaagctttagggccaaacataggctgctttaaaaaaaaaaaaaaaaaaaaaaagttagtcgaatccgtctcataacgaagtgtcagactgcgtgtcagggagaccgcgggccaggggttccagttggagcccagcgttccaggaggggatgaagaccgagttcggtaaaacagcgtggtattacaaagtttgcctttcaggctccggcctagctccttccttggcaactttgcaagtgccggcaaccctcactggatcatcctacccttggaacttcttgggaagcctcggtttagccttgggtccaccaagacttcggcgaaatggaggc

SEQ ID NO: 39996 - DNA, 382 bp, Homo sapiens; identical to SEQ ID NO: 25298
  chr18:46142413-46142795
  hypo

SEQ ID NO: 39997 - DNA, 141 bp, Homo sapiens; identical to SEQ ID NO: 13644
  chr18:47285293-47285434
  hypo

SEQ ID NO: 39998 - DNA, 800 bp, Homo sapiens; identical to SEQ ID NO: 23121
  chr18:47339411-47340211
  hyper

SEQ ID NO: 39999 - DNA, 697 bp, Homo sapiens
  chr18:49868091-49868788
  hyper
cggagctggcggcttcgacggccaaaagaatagaaaagagcaaaatgactcatgataaggtccacttgttttgcgggacctcaccgcaagtgtagatgggcactggggtacagtgagcggtcctggcaaagaaggagaggagagcggctggatgagcattcagagagcccttcggaaacgacctttttccaaatccaaaggaaaaacaggctcaggcagagaccgggcgttgagtaggagctccccagttcgtgcctgggaaattaacagggaatggcacatcaatcgcggccaagcccccagcctccccggagtccgcagctccggctttctcttctctgctaagtgctgcatggccaagggttgcgaacgcgagcagaaaatgcgcctctcactgtcgcgagggattcagacagtcaagcgccaaggcagcccgaggctccccaaagcctcgctcggccgcacgcgggcaggaatctgcgcttgcactcgggctcagctcctcatcttcctttggccagagacagagagagcaggcaggaggggtgtgtgtgtgtgcgtgtgtgtgtgtgtgtgtgtgcacgcgcgctgtcctgtgatgagcgcgtacccgcatccccgcgcttagccgctggtgctccctccctccgtctgtccctcccgggccggtcccctcctcccctggctcttctctccc

SEQ ID NO: 40000 - DNA, 1490 bp, Homo sapiens; identical to SEQ ID NO: 24116
  chr18:5237294-5238784
  hyper

SEQ ID NO: 40001 - DNA, 802 bp, Homo sapiens
  chr18:53446783-53447585
  hyper
cgacttaacgtttcaggaatatgaattctatgttcagaaaatttccccacactcttcttcgctggcacattcactgatgtagaaaatgccaggagccccgggggtgtgatgtttccggtggataatgtctcccgttccctgccccggggcccagacagttggtgcttaagcgtctacaatgtagagtttcctgcattttcctcgggccgccatttgtctacttgtcccatccaggacatctccctaaataatctctaagtggaaaaatcacggtcctctaggagatttatccgggaacgaacgtgcgtggggcagttcaaattcctgagctcagatttcgtttcccgcggtcagatggtgcggtcggtggggcccgagggatgcgcacagctgtgcctgagaggtgctgctctcccgccaccgaagtcgctgggaaattctgctgcactgagacattttaatgtcggatgttctaatcctgcgggcaaaaaaaaaaaaaaagtttgaaccaggtactgggcttttgtcacggtgaaccccacccgcgccccgcgccgtcccttcattcactcaggcgaggtggcttggatttgcacctcgttgaagaagcctcccatgcgacatctccgccagcaccccgcgcggacttggctgggcggcggcggggagtcagcttgtcaccgcacggcggccgggaccgcagcccctgggtgcgcagtgcgcctctcgctgcgccctcctagagcgcgggtcccgtgcctgtgcccggcgcgacgcgatctccctgctagtcgggctccgc

SEQ ID NO: 40002 - DNA, 172 bp, Homo sapiens; identical to SEQ ID NO: 22051
  chr18:56008826-56008998
  hypo

SEQ ID NO: 40003 - DNA, 1799 bp, Homo sapiens
  chr18:56939067-56940866
  hyper
cgagaagtttggttggatgtgcaccagaaaaggaaaagtcagtttcttaaataaatccacccgaagtttcaactgcgaggtgccaggcccttcgcaaggaaacagggttttcgtttccaactcggtattcgcagctagtgacgagggtggcatttggggccccaatcctgtcaccctcgatcactacctgcattccatttccactcagcaacccccaaccccttcctggctatgtctaatgagctgtcggcctcttcatcttgcaagtcattcccatcttctattttgagtttagaagagggaaacccccaaaggggagctcgtactacaaactggaacagactgcttgaagggcgatgcacagggaacatcgaagatctgtgcctctcccttgagactctgggcatgccaagtcgaggaaggacagtaataaatgcatggacacccgtgaattccgagaagcattggctgcaatttgggcctcgggccctcccagatcccagttcctcaacctgggcgctttacctggacccggacctctggtaggttgaccttgccggccagctcctcgcggctgtacacgtccgggtagtgggacttctcgaacgcgcgctccagctcatgcagctggtacgtggtgaaagtcgtgcggttccgccgatgctttttcttgggctgttcctcctctgacagtttcgcttcgccggtggctggcccgacgggcagccctgggctcggccgtgcctccccgggctccttggggcagtagggtcgaggggctggggcgacgaggcccgggagggtcagatgcactccccaaaacacccttgggccgaccccgcctcgctgtgggcactggccagcccgcctgcgggctccgagatggcccggggaggtccgtggtgagggcggcgatgggtcctaagctttctctgaatgcaaattggaagctcccgccatagacggtccccaaccccgcgcccagttgccttaataaaagttaaggaaggggcgctctcgtctggccaactcctaagctcgggcgcccgaacggcctcgcacagccaggggtgcgcactcaccttcgtactcgggggcgggcgccggggctggcggcggggagggctcggagccttcctcgggcgccttggggcaggcgggccgcgcgcccagcctcctatcccgctccttcgcgccccgggcgccccgctccgccgggaaggtgccgaggatcccgtcgtccttggtaaaccccaggatggcctcgatgctgtgaagtcgcgaggtgctcccgcccgggctgcggagcaggtggccggcaagcgagaagctcccgtcggccatggctggcgcgcagcccggcaggtgcatggggagcgccgggaggcgggagggcgctttggagacggagaggagaggctcgaagccgggtcttcccgagtgcggcggtgcaacccgacgggtcccgaccctaggtcaagctccgcgggcgaagcccgcccgggctgcgcacgctgggggtggccgagcgctcagcccgctgccgccttagtcccagaagtcggaagttcgggctcggggtagctggggctctcggcgctaaaggcggggagccaactggccctcggctcctcccctctcgccctggacccagccccttctctcggcccctccctccacagaggggcgtgtcctcacccggcccagccacagggtcctctagtggccacccctgggccggcactaggaatattccccttccacctcttgatccgttttaagctttacaaacacactcc

SEQ ID NO: 40004 - DNA, 790 bp, Homo sapiens; identical to SEQ ID NO: 38965
  chr18:61603403-61604193
  hyper

SEQ ID NO: 40005 - DNA, 744 bp, Homo sapiens; identical to SEQ ID NO: 38249
  chr18:70210281-70211025
  hyper

SEQ ID NO: 40006 - DNA, 994 bp, Homo sapiens
  chr18:70535255-70536249
  binary
cgggctggagggcggtgcaggggagcggggcggccggggggggggccggggggcggggaagggagggaggagaaaggagccggaagagggcagagttaccaaatgggctccttagtcatggcttggggctccacgaccctcctggaagcccggagcctgggtgggatagcgaggctgcgcgcggccggcgccccggggctggtgcgcggcagaatggggccgcggcggcggcagcaaggacatcccagccgcgcggatctgggggaggggcggggagggggtgaggacccggctgggatccgcggctcggcccgccagggcgcagagagaggatgcagccgcaaatcccgagccggatcctcgtgccggacggaaggcgtggaagcgggaggggccttcgtgtgaaaatcccttgtggggtttggtgtttcactttttaaaggttagaccttgcgggctctctgcctcccaccccttcttttccatccgcgtaaaggaactgggcgccccctctccctccctccctggggcgcaggtttcgccgcggactccgcgctcagcttgggagacacggcaggggcgcgccccagggaaaggcggccgtaaaagtttcgcggttgagcactgggcctgatgtccagtccccccaccaaattactcctgcaaagacgcgggcttcttgcaattgagccccccacctcgaggtatttaaaaccaccccaaggcacacacggacccccgttcccccgcgccacttcctcctacaggctcgcgcggcgcgttaaagtctgggagacacgagttgcggggaaacagcaccggaagagcccgggcttgtaaaatgcgaatcaatgaatacgaaataagggcaaccgcgaggcagcgccgggaagggctggagcgcgcgggggtgcagggagtccctccctgggcgccgcaacggcacctcctccctttcccggctccgtcccgccctccctcggcctctgcggac

SEQ ID NO: 40007 - DNA, 278 bp, Homo sapiens; identical to SEQ ID NO: 31424
  chr18:72347372-72347650
  hypo

SEQ ID NO: 40008 - DNA, 874 bp, Homo sapiens; identical to SEQ ID NO: 22059
  chr18:74096607-74097481
  hypo

SEQ ID NO: 40009 - DNA, 418 bp, Homo sapiens; identical to SEQ ID NO: 24120
  chr18:74113780-74114198
  hypo

SEQ ID NO: 40010 - DNA, 168 bp, Homo sapiens; identical to SEQ ID NO: 22062
  chr18:74134219-74134387
  hypo

SEQ ID NO: 40011 - DNA, 1787 bp, Homo sapiens; identical to SEQ ID NO: 22063
  chr18:74153251-74155038
  hypo

SEQ ID NO: 40012 - DNA, 608 bp, Homo sapiens
  chr18:74325503-74326111
  hypo
cggtctcgtgcaagccccgcctctcccttactagcaaagttgtgaggacagcgcctgcacgcaacacttgcttactaacttgtaactgttattacagaaagcgtggagccaaacagatggcagaggcccaaggaagagcgcgctaaacccgaagtagatctgatttcacatcttgacttggcgattgtttagctgggtcagggtaaatgcctcactgttcctcgtctgtaaatgaacacgggtgctgaggttggggtgagcgcctcaccgagcctcagtttctcatctgtaaaatggacacctgtgcgcgcctcgcggcaggggctgctgagcacgcggatgggtcctctggaggctgggccgccaagaggcggcggctgcaccatctgatgctagagaacgagaaccgcagtgcgtgcccgacacaaagggaaggacaggggacactggaacaggggagacgacatggaagaaatctgggggagccaaaagccgccatgccgagaagggggtcggaggaggcgcgggagagaaaagcccagggctgtacactcgcatccctctgctgccggcccttcgggtacattcaaatactgggcatgagtccc

SEQ ID NO: 40013 - DNA, 101 bp, Homo sapiens; identical to SEQ ID NO: 22066
  chr18:74419743-74419844
  hypo

SEQ ID NO: 40014 - DNA, 934 bp, Homo sapiens
  chr18:74962671-74963605
  binary
cgtgctggcgcgcagcaagccgggcaagccgcggagcaccaccaacctgttcatcctcaacctgagcatcgccgacctggcctacctgctcttctgcatccccttccaggccaccgtgtacgcgctgcccacctgggtgctgggcgccttcatctgcaagttcatccactacttcttcaccgtgtccatgctggtgagcatcttcaccctggccgcgatgtccgtggaccgctacgtggccatcgtgcactcgcggcgctcctcctccctcagggtgtcccgcaacgcgctgctgggcgtgggctgcatctgggcgctgtccattgccatggcctcgcccgtggcctaccaccagggcctcttccacccgcgcgccagcaaccagaccttctgctgggagcagtggcccgaccctcgccacaagaaggcctacgtggtgtgcaccttcgtcttcggctacctgctgccgctcctgctcatctgcttctgctatgccaaggtgcacgccggtcgcggggccgagacgcgcgagggagggcggagggccggtgggggccctggggtctcagtgtcccgcggccctgccggagccttggcggcagcctggccccggtggtccccactctggcggcgctggtacggatctgtgcagagaggcttcctggccgctgctggagcgtgccattggcttgcgcaagaaagttacttggagtctgagagatgctggggaaagtttgcagttcacttcgcatggtccagtagaaccagtttctcctcccctccccttcctcggccctgcggcccttcaacgcccccaggttgcctgggcggtaggtaggcgggcgctgccgcatccttcccggtacagcaaaccccgctcggttccagcaactcttcaaccagatcagctgcgcggggaggttaccgccgcggc

SEQ ID NO: 40015 - DNA, 289 bp, Homo sapiens; identical to SEQ ID NO: 30028
  chr18:76653387-76653676
  hypo

SEQ ID NO: 40016 - DNA, 576 bp, Homo sapiens
  chr18:77270851-77271427
  hypo
cggggcatcctctgccggggcatcttccgccggggcatcctccgccgggacatcctccaccgggggctcctccgccggggcatcctgctccggggcatcgttcgccggtcttgtcgctgcggtggaagtgtcgtgttcccagccaggctgggagtggtcgctggcgaggcctggcgtgggcccgcggtgtctgtcagggtgccctgggccagccccgctgattcgatttagagctaacgagagtccaccaacggcaattacaggaacctaatggccttcctgccgcaccgctccgtggcacccggctcgctgtgatgaattgctcattatgtgcagtgttggaatagcctccacaagattaataattggataatcaatacagaaattcaatcttggggtgtttttttcactccggggtcaatatgtcctgaagattacaaggcccgactctgcctcccccctccccgctgcttccgcgttgggagtttggccagcacctcgccacacgatgggtcatggtgcgttgtctccgtacctccgtgacttttctattctttgcaaacagcaggttctgcc

SEQ ID NO: 40017 - DNA, 1056 bp, Homo sapiens; identical to SEQ ID NO: 31428
  chr18:77508739-77509795
  hypo

SEQ ID NO: 40018 - DNA, 268 bp, Homo sapiens; identical to SEQ ID NO: 13664
  chr18:77535504-77535772
  hypo

SEQ ID NO: 40019 - DNA, 738 bp, Homo sapiens; identical to SEQ ID NO: 23538
  chr18:77542640-77543378
  hypo

SEQ ID NO: 40020 - DNA, 701 bp, Homo sapiens
  chr18:77609451-77610152
  hypo
cgtccgacctcatccggggcaaggtcgtccgcgtgcaggagccgcatctggacaggccgcacctgccttccctccccgccttgctctgcgtcagcctaggagcctcctgtcctggccgcgggttacaccaagcgcggcggtaaagacaaccgttgtttcttagctgtcgtggtttctgagggcccagcgcggacgcttgcctttctctgctgcgtgaagtctgggcctcggctggaggcagagcggaggctggggccaccggaagccttgttcttgcgtggctgggggctgatgctggctgccggccgccctgggtggcgtgggagcaggagcgcgtggaagacccagcctctctgagagccccccacgtaatcacacagtgagaggtccgctgtggtttagtgggaggaacccgagactccacccaggctgagtgggagggaggcgagaccccacctggccgtgggaggaacccgagaccccacccaggctcagtgggagggaacggagaccccacctggccgtaggaggagtgtcccgcgcacctaaagggctgacagggccgtgtgaaaacccgccggggtcgctggtcctggctctcctgaccttctgcctccccgctaccctcatccatgtacccagcacacacgtgcacacatacgtggataaatggaataaacataaacttcacccagacagcc

SEQ ID NO: 40021 - DNA, 620 bp, Homo sapiens; identical to SEQ ID NO: 33560
  chr18:77627972-77628592
  hypo

SEQ ID NO: 40022 - DNA, 991 bp, Homo sapiens; identical to SEQ ID NO: 38257
  chr18:907197-908188
  hyper

SEQ ID NO: 40023 - DNA, 781 bp, Homo sapiens
  chr18:908937-909718
  hyper
cgacttatattattatcacgtttttcaactcggcgtgaggagggagaggagtgttcatatttgactaggaattgcaggatcgatgcaaactccagggcagcagccagactggcatatgtagggctctccggttactttctctgtatgtcgcgggtgagaggaacagcgaggacaatttagcgcaaacacacgaagggtcggatctcaagggggcagcgctgggagaaaggttaggcttgaagcgcgcgtcgcctgcccggatcttatcccgggccccctccgcagggtttggtgccaggagatcctgcgtggggaggggggcatcgaggggctgccgtctcggccctccccacggctgcttccaggcagaggcgggcgacgcggtgggcagtgcgagccccgggccctccccgaaggctcccgcgtggggtggggcccgcctgctccccgcggcgattgaacctgtgtctcccgccccgccaccctcttcccgacccctttgcttgcagtgggagcctcggcggcggcgcgggggacgacgcggagccgctctccaagcgccactcggacgggatcttcacggacagctacagccgctaccggaaacaaatggctgtcaagaaatacttggcggccgtcctagggaagaggtataaacaaagggttaaaaacaaaggacgccgaatagcttatttgtagcgatgggttaccagctaccctgtgtatacagccctgacgcaatgaaaagtcgttttccaaactgactcaacagtcatcgctc

SEQ ID NO: 40024 - DNA, 877 bp, Homo sapiens; identical to SEQ ID NO: 30037
  chr18:9708731-9709608
  binary

SEQ ID NO: 40025 - DNA, 224 bp, Homo sapiens; identical to SEQ ID NO: 25315
  chr18:9912782-9913006
  hypo

SEQ ID NO: 40026 - DNA, 652 bp, Homo sapiens; identical to SEQ ID NO: 24125
  chr19:1003171-1003823
  hypo

SEQ ID NO: 40027 - DNA, 1173 bp, Homo sapiens; identical to SEQ ID NO: 25316
  chr19:1004547-1005720
  hypo

SEQ ID NO: 40028 - DNA, 362 bp, Homo sapiens; identical to SEQ ID NO: 25317
  chr19:10197461-10197823
  binary

SEQ ID NO: 40029 - DNA, 865 bp, Homo sapiens; identical to SEQ ID NO: 24127
  chr19:10397603-10398468
  hyper

SEQ ID NO: 40030 - DNA, 292 bp, Homo sapiens; identical to SEQ ID NO: 22824
  chr19:10691764-10692056
  binary

SEQ ID NO: 40031 - DNA, 1038 bp, Homo sapiens
  chr19:1079725-1080763
  hypo
cgcacctgcgtggccgacgcgaagacgcagaagcaggagctggaggataccaaggtgacggcgctgcggcagatccaggaggtcatccggcagagcgaccaaaccatcaagtcggtgcgtggggtgctccggccgcccgggcggggatggtggaccgggcggcctcctcctgacccctccgctctccggtgccgcccgcaggccacgatctcctactaccagatgatgcatatgcagacggcgccgctgcccgtgcacttccagatgctgtgtgagagcagcaagctgtatgacccaggccagcagtacgcctcccacgtgcgccagctgcagcgggaccaggagcccgatgtgcactacgactttgagccccacgtctccgccaacgcctggtaccgccacccagctgccctgtccccggcgcacaaggccctgcctgggagccgggcttccctctgtcgggggcatgaagatgaagctgtcttgccccccatcacctcccctccttttcccggtttcttccactaggtcccccgtcatgcgtgcccggaagagcagcttcaacgtgagtgatgtggcgcggccggaggctgccgggagccccccagaagaaggcgggtgcactgagggcacacctgccaaggaccacaggggtgagtgtccggcggggcccaggggcggacgctggctccctgcgacccaccctggcccttcaccagagacgcctctttctccagccgggcgaggacaccaggttcacaagtcatggccgctctcgatctcagactcggacagtgggctggaccccggccctggcgcaggtgagggaggctctctggcgggctggggtgtggagctgcctcctctcctgagcctcagggtttcatcacccaccggggtgatggagggggcccccctggctgggggagtctgaacagtcctgattcccgcccaggggactttaagaagttcgagcggacgtcatccagtggtaccatgtcgtccacggaggagctggtggacccagacggtggagcc

SEQ ID NO: 40032 - DNA, 257 bp, Homo sapiens; identical to SEQ ID NO: 23542
  chr19:11003007-11003264
  hypo

SEQ ID NO: 40033 - DNA, 261 bp, Homo sapiens; identical to SEQ ID NO: 22088
  chr19:12807005-12807266
  binary

SEQ ID NO: 40034 - DNA, 269 bp, Homo sapiens
  chr19:1308062-1308331
  hypo
cggtcgcctggtggagcagaaaccaccgccagcggctccccgtctatttgtctgtgcacattcctgggctcagacggtggcttccgaggccggaacttcggagtcacctgctccgcacttgagtctggaacgtctcagaccggacccctccctttacagcctgagagagggagagaccctgcccaggcctcccaggggcctgcccacccgacagctcctgactcccccaccctcattggtccagaaatggaaggcttcggcccaggagc

SEQ ID NO: 40035 - DNA, 55 bp, Homo sapiens
  chr19:13201116-13201171
  hypo
cgcaacgacaggcgcctcctctgccaaccggtttgtcagcatcggaccccgggac

SEQ ID NO: 40036 - DNA, 526 bp, Homo sapiens; identical to SEQ ID NO: 25324
  chr19:13209965-13210491
  hyper

SEQ ID NO: 40037 - DNA, 519 bp, Homo sapiens; identical to SEQ ID NO: 25325
  chr19:13213427-13213946
  binary

SEQ ID NO: 40038 - DNA, 576 bp, Homo sapiens; identical to SEQ ID NO: 7077
  chr19:1333769-1334345
  hypo

SEQ ID NO: 40039 - DNA, 687 bp, Homo sapiens; identical to SEQ ID NO: 25327
  chr19:13983612-13984299
  hyper

SEQ ID NO: 40040 - DNA, 82 bp, Homo sapiens; identical to SEQ ID NO: 26567
  chr19:14244894-14244976
  hypo

SEQ ID NO: 40041 - DNA, 593 bp, Homo sapiens
  chr19:1494971-1495564
  hypo
cgcgcccggctgcaaacacttcactgggcagctattccgcacccacccccactgcccagcgtcgagctcctgcctgcccttggggagctctcaaccccggtgggggacatggacacgttgaccagttacaggcacaaggctcagggcctagaggcacgatgggggatgtacaggcacatcaggggcagtggacatatcctggaggcggctcctgggaggaggtgacggttgcagtcttcgtcgactgaaaggcggcctgggtaccgtcgtgggggctcagcgggtccccagccctggcacaccaccgcctctctccggcaggagccgtcactctgctaagcctgtatctgctgttcggctacggagcgtctctgctgtgcaatctcatcggatttgtgtaccccgcatatgcctcgtgagtgcacggctggctgcccacgcggggggttctgggggctccctggcagcccctgaccctgctgcaccctccctgcagaatcaaagctatcgagagcccaagcaaggacgacgacactgtgtggctcacctactgggtggtgtacgccctgtttgggctggccgagttcttcagc

SEQ ID NO: 40042 - DNA, 241 bp, Homo sapiens; identical to SEQ ID NO: 22099
  chr19:1506026-1506267
  hypo

SEQ ID NO: 40043 - DNA, 719 bp, Homo sapiens; identical to SEQ ID NO: 27768
  chr19:17392397-17393116
  binary

SEQ ID NO: 40044 - DNA, 301 bp, Homo sapiens; identical to SEQ ID NO: 33576
  chr19:17757928-17758229
  hypo

SEQ ID NO: 40045 - DNA, 666 bp, Homo sapiens; identical to SEQ ID NO: 24136
  chr19:17759152-17759818
  hypo

SEQ ID NO: 40046 - DNA, 618 bp, Homo sapiens; identical to SEQ ID NO: 25345
  chr19:17958343-17958961
  hyper

SEQ ID NO: 40047 - DNA, 537 bp, Homo sapiens; identical to SEQ ID NO: 31466
  chr19:1799819-1800356
  hypo

SEQ ID NO: 40048 - DNA, 546 bp, Homo sapiens; identical to SEQ ID NO: 24138
  chr19:18092401-18092947
  hypo

SEQ ID NO: 40049 - DNA, 617 bp, Homo sapiens; identical to SEQ ID NO: 24142
  chr19:1856948-1857565
  hyper

SEQ ID NO: 40050 - DNA, 237 bp, Homo sapiens; identical to SEQ ID NO: 25350
  chr19:18807947-18808184
  hypo

SEQ ID NO: 40051 - DNA, 1111 bp, Homo sapiens; identical to SEQ ID NO: 22826
  chr19:1978023-1979134
  binary

SEQ ID NO: 40052 - DNA, 618 bp, Homo sapiens; identical to SEQ ID NO: 38981
  chr19:1992849-1993467
  hypo

SEQ ID NO: 40053 - DNA, 287 bp, Homo sapiens; identical to SEQ ID NO: 26581
  chr19:19932106-19932393
  hyper

SEQ ID NO: 40054 - DNA, 197 bp, Homo sapiens
  chr19:19932505-19932702
  hyper
cggcacagagcagtgaagacgatagctggatctctggcgtcagcgagagacaatgggcccgccaaagccggaagccggaaaccgtcctgttcgctacagctgcgtggctgattggacggtttccagcccagcgtccctgattggataatgcttgaggccccgccccctcaggtcctgagttacagaagacgtgatcc

SEQ ID NO: 40055 - DNA, 773 bp, Homo sapiens; identical to SEQ ID NO: 23135
  chr19:19976556-19977329
  hyper

SEQ ID NO: 40056 - DNA, 558 bp, Homo sapiens; identical to SEQ ID NO: 25355
  chr19:23598378-23598936
  hyper

SEQ ID NO: 40057 - DNA, 156 bp, Homo sapiens
  chr19:2363024-2363180
  hypo
cgctcaggctggcctgaccgtggggtaattgggccctgcagagcctcacgccgcctgcttgtcctgccacgcggaatgggagtccgtgtgtgccccgctgcccacagcgtgtgaacgtgagttggggaccatgtggcccactgcgcgctgggtccc

SEQ ID NO: 40058 - DNA, 314 bp, Homo sapiens
  chr19:2573883-2574197
  hypo
cgtggtcatatgcgaacgggtgaattaaattctttctggaagaggctggaaaggcactgcatgaatgggacataccgtgggtgccacggaccagctgctgcgaggtacggccggagttctgccgcctcggggaggcctgggtatcccgagaccagagatgctgccttctcaccttgggtgcctgggtctggcccagagcccgtcacacctgggctggtgcagtccaggtgaaacccgccctgccagccacccccaccatctcccggggtgtccctgctgggcctgcattctgacatcacgccttcaaactcaac

SEQ ID NO: 40059 - DNA, 302 bp, Homo sapiens; identical to SEQ ID NO: 33590
  chr19:33996103-33996405
  hypo

SEQ ID NO: 40060 - DNA, 220 bp, Homo sapiens
  chr19:35168869-35169089
  binary
cgcggggtgatgacggcgccgacctcttggcactgttgtgagagcgaagtgggcgcgagagcagacgccagctacagttttttttgggttatgtcgtcatgaagccggcgctttcagttgtgcaaccttgaacaaatgggttcagtatctcggaatttcagttttgtcttcattttaaaaaataaatctggtttagaactcgacctcaagcgatccgccc

SEQ ID NO: 40061 - DNA, 856 bp, Homo sapiens; identical to SEQ ID NO: 22832
  chr19:36909065-36909921
  binary

SEQ ID NO: 40062 - DNA, 762 bp, Homo sapiens; identical to SEQ ID NO: 36569
  chr19:37263645-37264407
  binary

SEQ ID NO: 40063 - DNA, 604 bp, Homo sapiens; identical to SEQ ID NO: 23149
  chr19:37288206-37288810
  hyper

SEQ ID NO: 40064 - DNA, 154 bp, Homo sapiens; identical to SEQ ID NO: 22120
  chr19:379979-380133
  hypo

SEQ ID NO: 40065 - DNA, 249 bp, Homo sapiens
  chr19:3821002-3821251
  hypo
cggggacacagggacaccgggggtcgggggacacaggtcacaaggcacctctgcagccgtgtggtccagcgagttggccggcagtgtccctgcgtctacggaggccctggagcccacgtgtcaggtccgcacgccactgtgcccttgcccgtctgctctggaaccctctcacgctcccacaccaggacgtgcccactgcccgggcacccgtctccccccactgctcgagagctcacacggaggagctcc

SEQ ID NO: 40066 - DNA, 792 bp, Homo sapiens; identical to SEQ ID NO: 26640
  chr19:38719834-38720626
  binary

SEQ ID NO: 40067 - DNA, 202 bp, Homo sapiens; identical to SEQ ID NO: 28857
  chr19:38905516-38905718
  hypo

SEQ ID NO: 40068 - DNA, 86 bp, Homo sapiens; identical to SEQ ID NO: 7107
  chr19:39289891-39289977
  hypo

SEQ ID NO: 40069 - DNA, 369 bp, Homo sapiens; identical to SEQ ID NO: 22125
  chr19:39435437-39435806
  hypo

SEQ ID NO: 40070 - DNA, 481 bp, Homo sapiens; identical to SEQ ID NO: 25370
  chr19:403382-403863
  hypo

SEQ ID NO: 40071 - DNA, 109 bp, Homo sapiens; identical to SEQ ID NO: 22127
  chr19:40474764-40474873
  hypo

SEQ ID NO: 40072 - DNA, 1004 bp, Homo sapiens; identical to SEQ ID NO: 25372
  chr19:407139-408143
  hypo

SEQ ID NO: 40073 - DNA, 829 bp, Homo sapiens; identical to SEQ ID NO: 28862
  chr19:418231-419060
  hypo

SEQ ID NO: 40074 - DNA, 441 bp, Homo sapiens; identical to SEQ ID NO: 22838
  chr19:42028298-42028739
  binary

SEQ ID NO: 40075 - DNA, 354 bp, Homo sapiens
  chr19:44405817-44406171
  hyper
cgccccgttcacgccctgggtcttctggtcttcagcgcctctcatcctcaccgccggttccattccaaccagggactgtggaagcctccgctgatttctgtggagacgatctactcaccacgtaggggctacagcagctcggacaccggaaaaagatctagagctcgagggtgaccctagcgcggtgacttctgggaaatgtagtccacccggaataaccatgtccacggcgcccgccattctgtagcctatgctcggagggcacatgagcaagagcttgaccatctgtaccgttggttgacttgctctattaagggctatgatttcaggtcgtcctgcgtgtttagaggaggc

SEQ ID NO: 40076 - DNA, 501 bp, Homo sapiens; identical to SEQ ID NO: 23159
  chr19:44711530-44712031
  hyper

SEQ ID NO: 40077 - DNA, 369 bp, Homo sapiens; identical to SEQ ID NO: 24170
  chr19:4548007-4548376
  hypo

SEQ ID NO: 40078 - DNA, 283 bp, Homo sapiens; identical to SEQ ID NO: 26650
  chr19:4555911-4556194
  hypo

SEQ ID NO: 40079 - DNA, 1781 bp, Homo sapiens
  chr19:45655296-45657077
  hyper
cggcttgccctgaggcacggcccgacgggggcgccctggaggcgctgttggcccggtgggcagcgtggggggtatcgcgggtaggggacttgggcgggctgggcggcttgagcgcgctgacggctcggatgagacccatgcgccggcggatggagtggtccaggttgaccgtgcagcgcagcaggctctgcgcctcggccacggtgaaggggaagtcggcgcccaggaagcgctcgaagagctcggggtcgccgtccaggtcgagcacgttctgcaacgccttggtcatggtgtgcagctcgcggctgttgtcgcggaaaacgtcccagaggcgcgcgcggccctcgggcgcgcccccggtctgctgccggtcctccaggcactgcagcgcccagctcaggcggcacggccactggttggcgagcaccacccacgccaccgcctggcgcggcgtggggcccccaaagtccccctgctgctgctgctgctgcagcaggcgcacggtgatgggcacggtgttgacgatgcgccgcatggacaccacgttgtcgggcacgtactcgtagaggcagtcgcgctcgtcgtgaaggcagaagagcgcctcctggattcgccgcgccgcctcgtcgtcgatgcggccctgcccgcgctccgtccccgcctgcgcctgcaccgccagcagctgcgcgctctcgcccccggcgtcccccggcagccacggcttgcgcgtcatctcgcggtacaacaggtcgtcgcggctctgcaccgcatcgtgcaggaactgcagcttggtgcggcggcccataatgggcacagagaagggcagcgtgacagtgcggttgaggaagaggtagccgttatcggccgtgcccttcatgttgcccgcgctctctaggcacgcggccaggatgctggggtccacgaccaggatgaagatgaagggcgcgtggctgtcggacagcagcgtgttgatggcgttgagcacgcccaccacgcgctccgggtagcacgtgtccagcccggtgacctccagcaccacgcgcagcctgcgccgctggtagatctccaggaagcacaggaagtcggtgagcagctccacctccttcttcacctcgcacatgaaacccagctggctgccgaacttttcacgcgacaccagccgctcgatcttcttgcgctggcttacgaacaggtgcttgcccaccgagtacacggccatgagcagccccgagcccgacagtgtggtggccgcgccgccaaacaccttgagcaggctgccgctcgggctgccgtggcccagcgcgtggccgcccagtgacaagtagagcagccccacacccaggcccagcgccgccagcagcgccagcagccccaggcacacgcggcgccgacaatgccactcgctctggcagcagtcctgcctggtggccggcttgttgcccagcaccgagtacacgctgaagggcagtgcgccatagtggcggcggatgccctcgcacaacgtggtcaccaggccggcccacagcttgtcggtgcccgcgtactgccaggcgctaaagcggatgaaaaggaactgcacgttcctgcgccgcaggtgcacctcggtgatgatgggctgcaggaacaccaggtaccacagtagctgcgggacgccccagccgctcacggcacgcggccgccactgcacgtgctgcagctcctcgctctcgcgctgcgcggcctcctgctgcatcagcgctgcgggaagggagcccgggagccgcgtgagccgcagacccgcc

SEQ ID NO: 40080 - DNA, 338 bp, Homo sapiens; identical to SEQ ID NO: 31506
  chr19:45810004-45810342
  hypo

SEQ ID NO: 40081 - DNA, 579 bp, Homo sapiens; identical to SEQ ID NO: 38290
  chr19:46307556-46308135
  hypo

SEQ ID NO: 40082 - DNA, 602 bp, Homo sapiens; identical to SEQ ID NO: 25385
  chr19:46379840-46380442
  hyper

SEQ ID NO: 40083 - DNA, 277 bp, Homo sapiens; identical to SEQ ID NO: 24176
  chr19:47116867-47117144
  hypo

SEQ ID NO: 40084 - DNA, 112 bp, Homo sapiens; identical to SEQ ID NO: 8263
  chr19:47646754-47646866
  hypo

SEQ ID NO: 40085 - DNA, 175 bp, Homo sapiens
  chr19:49997367-49997542
  hypo
cgtgagccatcgcgcccggccaattttttttttttttttattaagatgttctatagctgcactaactgatacacaatacacaagccactaaccccacttgtggctcctgagcacttaaatatgaatagagtgaggctgggtgcagtctcacctgttcccggaactttgggaggcc

SEQ ID NO: 40086 - DNA, 181 bp, Homo sapiens; identical to SEQ ID NO: 24184
  chr19:50320022-50320203
  hypo

SEQ ID NO: 40087 - DNA, 441 bp, Homo sapiens; identical to SEQ ID NO: 25405
  chr19:50364788-50365229
  hypo

SEQ ID NO: 40088 - DNA, 702 bp, Homo sapiens; identical to SEQ ID NO: 30084
  chr19:50393295-50393997
  hyper

SEQ ID NO: 40089 - DNA, 1274 bp, Homo sapiens; identical to SEQ ID NO: 37412
  chr19:50836203-50837477
  hyper

SEQ ID NO: 40090 - DNA, 262 bp, Homo sapiens; identical to SEQ ID NO: 33607
  chr19:53507240-53507502
  hypo

SEQ ID NO: 40091 - DNA, 837 bp, Homo sapiens; identical to SEQ ID NO: 24189
  chr19:549193-550030
  hypo

SEQ ID NO: 40092 - DNA, 286 bp, Homo sapiens
  chr19:557055-557341
  hypo
cgtgagttttggggggcaccgttctccctgggaagacgcagacgcttgtcgtcccgtggtaaatgccagaaggcctcatctgatgcccacgtacgccctgaggtggggaagctgctgtcctcatccttgctgagcgtggggccccaggattctcaggcagctggatgagcctgtggagaggccggtgcccaggctcggtcccagaacaaagcgcagaggcacgatggtcgctgacaaagtgggggccccgggaccccaaacagaaaggtccacaaaggctgaggtc

SEQ ID NO: 40093 - DNA, 117 bp, Homo sapiens
  chr19:557942-558059
  hypo
cgtgagccaccacgcctggccccttattgaacttgatggtttctccttcgtatctcagaagtcacaagctggaggatttaggtttgaagaatcacgatgccaaggtcaggcgccgtc

SEQ ID NO: 40094 - DNA, 108 bp, Homo sapiens; identical to SEQ ID NO: 13750
  chr19:55976235-55976343
  hypo

SEQ ID NO: 40095 - DNA, 269 bp, Homo sapiens; identical to SEQ ID NO: 24192
  chr19:56688223-56688492
  hypo

SEQ ID NO: 40096 - DNA, 912 bp, Homo sapiens; identical to SEQ ID NO: 26697
  chr19:58094913-58095825
  hyper

SEQ ID NO: 40097 - DNA, 846 bp, Homo sapiens; identical to SEQ ID NO: 24194
  chr19:58219927-58220773
  hyper

SEQ ID NO: 40098 - DNA, 781 bp, Homo sapiens; identical to SEQ ID NO: 23178
  chr19:58280766-58281547
  hyper

SEQ ID NO: 40099 - DNA, 878 bp, Homo sapiens
  chr19:58739694-58740572
  hyper
cgactgagcgatcacctaggacgaatcgcctccagttagcgtgcttccaccttccactcggaatgctccaagcagggcactcccggggctttgtttctatcactaggacgcgtccccacgcccaggctgtccctgagtccctgccacaggcgcagatgttggcgggcgcccttgcccctgagctcccggttaacggccttggactgttctcatggctcagtcttggtctctctccccagcagggcaaggcgccgggaaggcacccgagatgacagcgccgagccccataggcgctagtcccgccctggacgccgaccgccgcctccacagtctcggcttcggttgctggatgagaaccagcgtggcccgtttaagggggaggggacaggcgctgcaaggagcagagccgcgggaagcaactccctaagccacaatgctagtcgcgaacacaggaaaaagctcatcccgccgccgcggggccccatgctcccgccggcaatgactatgcctgtgggagcaacggctaccggcgcgcggccttctgggagttgtttgttgcgcggagcgcgggcacgtccgccggccaccggaagcaccgccattggccggtgcgtgcaggtgagtctggcggcctcaaggttggctcggaggtttcactgttagccgggtgcggccggagcgcaggaccaggccagagccgccccaagtgatctgggcgtgccggagaaacgagcagggcctgcgggggtccctcatgcggcgaggccgagcaagggcaggggcctgatgggatcgggatctctccggcctcagggacggggaaggccggtccagtcaggtttcccctgcaggagcgcccggctgggtctgagcttgtc

SEQ ID NO: 40100 - DNA, 1058 bp, Homo sapiens; identical to SEQ ID NO: 26706
  chr19:58951083-58952141
  binary

SEQ ID NO: 40101 - DNA, 134 bp, Homo sapiens; identical to SEQ ID NO: 25417
  chr19:58964127-58964261
  hypo

SEQ ID NO: 40102 - DNA, 396 bp, Homo sapiens
  chr19:5896616-5897012
  hypo
cgagacgggcacagcaggagcctcttgggcgctcactgccagtgtctggatggagagagatgccacgagtcggctgctcgctgtgcatggcagcctcctggccccagtcctggagctgttctcctgggcctccccaccctacatgtattcctgataaaggaacaccccactttctccggatggccagcactgtggacacgggctggggagtcagagagaagaggcagccgtcaaatgtgctctgagagctggggctgtgccaggagagggcccagccatgcccagcccagcgtgctcacctgcagtgaacgtgtattgtccaaccttagccactccttcaaggaaggtgcccggaggattgagtgtgactctgtaggcagcggcggtcaggcctgc

SEQ ID NO: 40103 - DNA, 425 bp, Homo sapiens; identical to SEQ ID NO: 25418
  chr19:5897319-5897744
  hypo

SEQ ID NO: 40104 - DNA, 1275 bp, Homo sapiens; identical to SEQ ID NO: 25420
  chr19:5915018-5916293
  hypo

SEQ ID NO: 40105 - DNA, 594 bp, Homo sapiens; identical to SEQ ID NO: 24197
  chr19:603411-604005
  binary

SEQ ID NO: 40106 - DNA, 299 bp, Homo sapiens
  chr19:629526-629825
  hypo
cggctgcactcacctgccgcgcccagccaagcatcacggcgttgtacatgtccagcgtgagcagcttccgcttctgccgctggccgtggtggacgaccagcaggtggtgggcgaggggcagctggtcagtgagcaggcagcacttgaagaaggccaggagcctctgctgctgacctgagagctgggcctgcgagtgctgccccgacggggcctgctccacatcgaggctcagcttcccaggggcctcctgcagcagccgggccagctgctcctcccaggggctctcgggggcctggcgc

SEQ ID NO: 40107 - DNA, 944 bp, Homo sapiens; identical to SEQ ID NO: 27829
  chr19:6590260-6591204
  binary

SEQ ID NO: 40108 - DNA, 131 bp, Homo sapiens; identical to SEQ ID NO: 22165
  chr19:8526882-8527013
  hypo

SEQ ID NO: 40109 - DNA, 62 bp, Homo sapiens; identical to SEQ ID NO: 22166
  chr19:8535026-8535088
  hypo

SEQ ID NO: 40110 - DNA, 932 bp, Homo sapiens; identical to SEQ ID NO: 23565
  chr19:883424-884356
  hypo

SEQ ID NO: 40111 - DNA, 614 bp, Homo sapiens; identical to SEQ ID NO: 15795
  chr2:10334473-10335087
  hypo

SEQ ID NO: 40112 - DNA, 751 bp, Homo sapiens; identical to SEQ ID NO: 28928
  chr2:105458972-105459723
  binary

SEQ ID NO: 40113 - DNA, 619 bp, Homo sapiens; identical to SEQ ID NO: 25427
  chr2:10588876-10589495
  binary

SEQ ID NO: 40114 - DNA, 290 bp, Homo sapiens; identical to SEQ ID NO: 36603
  chr2:106730126-106730416
  hypo

SEQ ID NO: 40115 - DNA, 482 bp, Homo sapiens; identical to SEQ ID NO: 24223
  chr2:113103038-113103520
  hypo

SEQ ID NO: 40116 - DNA, 617 bp, Homo sapiens
  chr2:113341835-113342452
  hyper
cggagatttggagcgcttgtgtctgaggctcaatcccgtcaggtgccgcgcaactcagcggcgcattctctttggacccgaggcaccaccatactttccattgcttacttccgttaaaccccgagcgctgccatggcaagccggaaatagggatgaagcaatttagccagaagagggcggaagtggctactcagggcgccgccatgacgagccgggccggaagaagaggtagggcgccgccgtgacagattagtcctaaagggaacggggttgttagttcaattggctaccggaaaaaaccaggctgggctgggcgccgccatgacaaccgataccggaaaaggcgggtcgttccccccggacagccctacgccggcaaaggtctcgagatgtgagtagtgagagcgcctaccccatacgtgctgccgctccccttcttttacccagtgatctagacctagtctaggacctcgggaactaggaccagcctccctccttcttggagatctgaccctcaggattcagcgccttcgctcacgagctccaaccctccgcatgcccaagccccgccctctaagcgtttaggcctcgccccctctcgcgctgcttaggacttc

SEQ ID NO: 40117 - DNA, 1446 bp, Homo sapiens; identical to SEQ ID NO: 23182
  chr2:118981062-118982508
  hyper

SEQ ID NO: 40118 - DNA, 951 bp, Homo sapiens; identical to SEQ ID NO: 22857
  chr2:119915856-119916807
  binary

SEQ ID NO: 40119 - DNA, 154 bp, Homo sapiens; identical to SEQ ID NO: 19493
  chr2:121834588-121834742
  hyper

SEQ ID NO: 40120 - DNA, 286 bp, Homo sapiens; identical to SEQ ID NO: 26732
  chr2:122104584-122104870
  hypo

SEQ ID NO: 40121 - DNA, 776 bp, Homo sapiens; identical to SEQ ID NO: 26734
  chr2:127534409-127535185
  binary

SEQ ID NO: 40122 - DNA, 572 bp, Homo sapiens; identical to SEQ ID NO: 23183
  chr2:127782995-127783567
  hyper

SEQ ID NO: 40123 - DNA, 154 bp, Homo sapiens; identical to SEQ ID NO: 12561
  chr2:130512142-130512296
  hypo

SEQ ID NO: 40124 - DNA, 878 bp, Homo sapiens; identical to SEQ ID NO: 22861
  chr2:139537357-139538235
  binary

SEQ ID NO: 40125 - DNA, 1989 bp, Homo sapiens; identical to SEQ ID NO: 25434
  chr2:157176355-157178344
  hyper

SEQ ID NO: 40126 - DNA, 772 bp, Homo sapiens
  chr2:159825046-159825818
  hyper
cgcgagaggaaggtgccttcgggaacacgcgcaagggcggggattcgcgctgccaatgaggccccggtgtgggccgagcaaggcggggggacgggccggagcggaggctttgctgtggcagctgctggagcggcggccgcctcgggagccggaggagaggcagccgcggagcgccgagctggcctcgccccgaggcccggccctgggtgtggggaaccgcgctgaggagctggaaactttcccggcaggtaactcccgcagcccggactccgccgcgggcctgcgagcgccccgggcatggccagctgccagtgtgcggagaggtcgagagggacccggggtggagagggtgatgggagaagggaaaggcgtgtgggaaagtttctggagcgccccctcctccgccgggcacacccgggagctttccgggaataggcacagacatgttgggcgccccgggccttggtctctcggcggctttggggagtccgcaccttccttgcgcggttcccccgcgccggaccgagccggcctcccctggaaccggtgtggtgggaaccgggaacgcttggggcacgctcgagttctgggaccacccccgcccggcgcgcccgctcgccccctttcccgccttctctgtagccctcgggcttggcaagggcctgggctacgcctggtacctggcgcgggggaggcggggggaggcgcgcctggcaccgcggggtcctgggcgccccccggagtgttggggtgcgcgggtcgcgaagttgcc

SEQ ID NO: 40127 - DNA, 709 bp, Homo sapiens; identical to SEQ ID NO: 25435
  chr2:162283380-162284089
  hyper

SEQ ID NO: 40128 - DNA, 205 bp, Homo sapiens; identical to SEQ ID NO: 33640
  chr2:170282893-170283098
  hypo

SEQ ID NO: 40129 - DNA, 140 bp, Homo sapiens; identical to SEQ ID NO: 24229
  chr2:170551744-170551884
  hypo

SEQ ID NO: 40130 - DNA, 976 bp, Homo sapiens
  chr2:171570325-171571301
  hyper
cgagctccggcggccactccgcagtgcgctctcgcgagccggggccgcgaggcctccaacgcggttccgcacccctaatgccccagggcggtgagcaccccgcggttccccgcccgcctcttcctccttccccgcccgcgcgcccgggagaggcgatccccgcgtccgcagtgccggggcaggacgcgccctgcgccctgggccaggaggaggcaggtggccctcctcggcaggaggtgagccgccagggagggatgggggtcacccaagcccctgcaagcgcgaccctgcccagagcaaagcacgccccgcgcctggtgaggaactttttctttccaaaggtggcaggaacaagtctgtactgacttttctcccgccttcgggatcctctctcgtatgatttgtggtttgtgggaccacaacaaccaggcttcctcgaccgcgccttttttccagtagctcctggtctgccaggcttgcgagagggcgcgctggcttggcggggctccgggcgagaaatcaccagcagcgctggggctttcggccccccacagcccagcccgggcctcctgggtggcctggggagaagggggcgggacagcacagcttcttcccctcgggtgggcatgacgggtcgccttgggtgtcctgccgagctcagctttgagggtatgcgcggcgcgggtgtttttcccaggtccactctgcaaaagttgtggcctgaggaaaacttccaggtcgccagcaggaacgtcacaggagagccccggtcgctcgtcaggcgggcggccctggagcgtgcgcgccacccaacgccgcgctgggcggccgcccggccccgccccaggtcacagccctgccctcggccccaccgcggcgggcgggggacacgcggcgggccgggcgctgtcggtcccacgccccaccggggatctcgcttgggtccgctgtgtgcgcgggcgggtgcgtgtgcggc

SEQ ID NO: 40131 - DNA, 835 bp, Homo sapiens; identical to SEQ ID NO: 28944
  chr2:171671321-171672156
  hyper

SEQ ID NO: 40132 - DNA, 133 bp, Homo sapiens; identical to SEQ ID NO: 15812
  chr2:171730981-171731114
  hypo

SEQ ID NO: 40133 - DNA, 993 bp, Homo sapiens
  chr2:176945131-176946124
  binary
cgcgccggccgccgccgccgaggaggccgcagccgctgcggctgccgcggctgccgcggcagaggccgcgctgttgagccccgcggcggccgcgggagcctggtagagaccagggtggcggaagctacacagcagctccggccgagagtaggggtgcgagagggcgcggaaggtgtccagtggccggatggaagtagcgaagggcgacgaagccgcggccgccgcgcctgaggctgcagccgcggccgccgccgccgtgacgcccacgtgcgggtagtagtgcagcggcacgtgcgagtggaaggggtagggcaggcttccggtggcggccgcgtgcgtcatcatgtaggtgtagaagctggggtcggctgggtgcggccaggacatggccaggcgctgccgcttgtccttcatgcgccggttctggaaccacacctgcggggagagacgcgccgcagcctgggttagggagcgccccgtgttcccagctcctgtcccaggacctctgccccttccggacctctgaatggcttggtctacttctctccgaccaagcccaaccccgagtaccctgtggtctcccagctgggaaagtgtggacggcagtgtgtggaccgccgtgggcacaccgtcctcaacgaagagggtcctctcccccgcgtccggctgctgctgctcctcaggcttttattcccttacttcttgctgcacttttttgtcccaatccaacctttcctctccctcccgccacccaccagtgccggtctcgctgagcacccgtctctcaatcccaggatttgtacggggattctgggcagcctttgaagagaggctgccgctcagcttttctgagaggtcgccgcgcgaagtcttgagccctccgaactgcaaggacctgcccctaggggcacgggtccgattttgatattgaagggatgattttgttggaatcgtttgccttaaatgagtgggtagagcaatgtctccataaac

SEQ ID NO: 40134 - DNA, 353 bp, Homo sapiens; identical to SEQ ID NO: 20447
  chr2:178483339-178483692
  hyper

SEQ ID NO: 40135 - DNA, 486 bp, Homo sapiens; identical to SEQ ID NO: 19514
  chr2:179343487-179343973
  hyper

SEQ ID NO: 40136 - DNA, 31 bp, Homo sapiens; identical to SEQ ID NO: 22189
  chr2:190368120-190368151
  hypo

SEQ ID NO: 40137 - DNA, 330 bp, Homo sapiens; identical to SEQ ID NO: 37454
  chr2:19563170-19563500
  hyper

SEQ ID NO: 40138 - DNA, 64 bp, Homo sapiens; identical to SEQ ID NO: 22192
  chr2:196411561-196411625
  hypo

SEQ ID NO: 40139 - DNA, 111 bp, Homo sapiens; identical to SEQ ID NO: 22193
  chr2:201727391-201727502
  hyper

SEQ ID NO: 40140 - DNA, 885 bp, Homo sapiens; identical to SEQ ID NO: 36621
  chr2:207139040-207139925
  binary

SEQ ID NO: 40141 - DNA, 845 bp, Homo sapiens; identical to SEQ ID NO: 22871
  chr2:21022197-21023042
  binary

SEQ ID NO: 40142 - DNA, 333 bp, Homo sapiens; identical to SEQ ID NO: 33645
  chr2:220080617-220080950
  hypo

SEQ ID NO: 40143 - DNA, 947 bp, Homo sapiens
  chr2:223163042-223163989
  hyper
cgccaggatttgcagagagcagcgcgctccatttgcagaaaggaaatcgagtaggtcctcgcccccgactggtgcttcttggggtgtggggtgcccagggaatgggcttcctggaagcaccaaaggagcctgcggagcctggggatggggtgaggcagccggtcccaggccctgggatccaggcggcgcgctgaggccctcccttaccttccagcgggaacccgctacgcgggtagttctgccccgggcccggccgcatcatcctgggcacagcgccggccagcgtggtcatcctgggggcagcttcgctcggaaattatatccaggtgaaggcgaaacggaaaggcgagtgcggcgcggatgaccctcgggaactatccggagcgtggagagcccctccccaaaacggctggagagagagggagggacgcggggaggggggctgtcggttcctagtccagaggccggagctggaacccgggaaaggggaggacggggaggccccggagtccaggatcccgagcccagggcggaaaagtttggtacgagtctgggcaaatgttccagcgactggggtccctgaaaagggggctcagagagccacggcgagccggggagcctggtgaggctggagcgcggcctgcctgagtctcctcctgtggtgacaccgagtgcggggatccgggctcgggagcatttattagttcttttacccaaagcttggtcaggagccctgagctgcgattggccgacgggtagaccgtcccgggtggcggagacacgcgctgattgggcaacagcgaccactttctcttcccatctctggtggtgccgaggcctctgctggccccgagggggacccgcgctgcgccccttgcccaggagagaaggttggcccggtggaaactgagagagacagccccagggagatggcagttgctgagggc

SEQ ID NO: 40144 - DNA, 1287 bp, Homo sapiens
  chr2:225906006-225907293
  binary
cggattccggtccaccaaacgcaggccaagagcgcggctgctgagccccggtcttgctgtgaggctgttgttcccactcgcttcccgtttccactagagttgatttgtctcttgccacctctccccggcagtgtggacctactgcaacgcaggaacatctgggttggtatggataggatcctagcatcagatgctggctgctgccccagggacttcccgcggaaatcacccagcacttagaagccgtttcaataaggaagtaaccagtaaagcattgctggtgggagaaccccgcgaaacatcttagaaaaatatcagaaaccgctggagacctaatgacccacgtctcctccagcctgtgttcctcagccctttctggaggagtattaagtggtttgtgggtttttaccctgcggtgggagggctgttccaagtacatctatttctgcgatagttaacgtcggggggccccagctctaaccagggcgaggaccacggactgcatccctctctctcagcgcactggtctgtttactggagggtgagagggacgcgcagacctccggactcaggggttctgttctgtagatccccccaccccacccggggtctctggcactcgtatcacttagcaccagtgtgactggcggtgcattccggccccctcgcgccccattaaagcccctgcacatcctctcccacgctgcgcttctgctacccacgcagctgctcctctgagcgtcccgcgtgcacaaacgcgcccccggtccttacgcgtcggtggcgctgcctcgctgaggtggcgccgggggagcccgcagaggcggcgggggagggagtgcggaggagaggacccgtgagctgcggggacctgggcccgccgagcttttggggaagctgggctccgttccccccgggcgcctggggcgcgcgggaaggcgcggaggacgcgccgcactcacccgctgctgctgccggctgctgactgccaccgcggcggcggacgcggcgctgtgccggagctcggccgcctgcccaggtctcaacaggctccgggtgaacctgcgggtccgctcaccggccatcgccggtcacgccaatcgcgccgcgggcccggggcgcgcctcccgccggtcttccccgcgccaaccttctctatccacccgccgttcaggaagcggaactcggagccttcccccccctcttcctcgctcaactcgcaagaggcgggtttttctctcttgcacccccactcttcccacccccttccctcctctgaagcttctc

SEQ ID NO: 40145 - DNA, 210 bp, Homo sapiens; identical to SEQ ID NO: 22196
  chr2:227700369-227700579
  hyper

SEQ ID NO: 40146 - DNA, 337 bp, Homo sapiens; identical to SEQ ID NO: 13819
  chr2:227841945-227842282
  hypo

SEQ ID NO: 40147 - DNA, 400 bp, Homo sapiens; identical to SEQ ID NO: 33646
  chr2:228736169-228736569
  hyper

SEQ ID NO: 40148 - DNA, 131 bp, Homo sapiens; identical to SEQ ID NO: 8321
  chr2:231676894-231677025
  hypo

SEQ ID NO: 40149 - DNA, 321 bp, Homo sapiens; identical to SEQ ID NO: 31624
  chr2:231902837-231903158
  hyper

SEQ ID NO: 40150 - DNA, 460 bp, Homo sapiens; identical to SEQ ID NO: 33652
  chr2:240167455-240167915
  hypo

SEQ ID NO: 40151 - DNA, 80 bp, Homo sapiens; identical to SEQ ID NO: 15825
  chr2:240319796-240319876
  hypo

SEQ ID NO: 40152 - DNA, 765 bp, Homo sapiens; identical to SEQ ID NO: 33655
  chr2:240658158-240658923
  hypo

SEQ ID NO: 40153 - DNA, 224 bp, Homo sapiens; identical to SEQ ID NO: 27870
  chr2:241157285-241157509
  hypo

SEQ ID NO: 40154 - DNA, 116 bp, Homo sapiens; identical to SEQ ID NO: 22204
  chr2:241262542-241262658
  hypo

SEQ ID NO: 40155 - DNA, 211 bp, Homo sapiens
  chr2:241989249-241989460
  hypo
cgactcggacccctgcttcaacggaggctcctgcgatgcccatgacgactcctacacctgcgagtgcccgcgcgggttccacggcaagcactgcgagaaaggtatggcgggcaggggcgtccgggccggcgtcagcaccctggagagcgcccgcggtccgccgtcctgcttctctgctgtctctctccttgtttcgcgaattgctgacctc

SEQ ID NO: 40156 - DNA, 755 bp, Homo sapiens; identical to SEQ ID NO: 24252
  chr2:242004407-242005162
  hypo

SEQ ID NO: 40157 - DNA, 175 bp, Homo sapiens; identical to SEQ ID NO: 28972
  chr2:242554503-242554678
  hypo

SEQ ID NO: 40158 - DNA, 225 bp, Homo sapiens; identical to SEQ ID NO: 22209
  chr2:242599560-242599785
  hypo

SEQ ID NO: 40159 - DNA, 442 bp, Homo sapiens
  chr2:242766046-242766488
  hypo
cgacgttctctttgtctgactttctgctcctgccgcgtgcgcagaggggcgaggaggaagcatttgcgcatgcgcagaaggctcgctccacgccacgtgcttcaagcgcgtcgttccgtttagtatgaaataaaggcccgcggggtggagaacgtgtctgttttccagatgtggagatcaaggcccggcaagtcctctgttgttgacggttctcaggtggtagaaacgatctcgcagcgcacctgcgtggcttccgaaaccgttgtctcaagcgtgttccacttgatgtgattaaaaaagttctcgtggccccaagcacctgctttacctgctcagaccagagtgtcgttccgtcccattcattccgcagctttccccgaacgcacacaagtgaaatgtaaatgtcagtgtgtgtgtatctatctcccgtttctcccaaagc

SEQ ID NO: 40160 - DNA, 251 bp, Homo sapiens; identical to SEQ ID NO: 33660
  chr2:242933420-242933671
  hypo

SEQ ID NO: 40161 - DNA, 225 bp, Homo sapiens; identical to SEQ ID NO: 15834
  chr2:28065720-28065945
  hypo

SEQ ID NO: 40162 - DNA, 725 bp, Homo sapiens; identical to SEQ ID NO: 30177
  chr2:29033285-29034010
  binary

SEQ ID NO: 40163 - DNA, 771 bp, Homo sapiens; identical to SEQ ID NO: 26786
  chr2:31360210-31360981
  binary

SEQ ID NO: 40164 - DNA, 836 bp, Homo sapiens
  chr2:38301660-38302496
  hyper
cgcggggggcggccccgggccgaaggctttcgcagtgcctcaagaacttgtccaggatgaagttgctgaagttgcggttgagctgctcgaattcgcggaaaacggtgcgcaccgggttggggaagtactgcagccagggcatcacgtccaccaggctgcccgcgcccaccgtgcgcccgaactcttcgttgtggctgagcagctcacggaactcggggtcgtcgtggctgtagcggcagccgaaacacacggcactcatgacgttggccacggccacgacggtcagcggcctcgggtcgaggaaggcgccgtccgcgctgccgcgcaccagcagcgccaccagctcgcgcgcctcgctcagcacgtggccctcgaggacttggcggctgcgcggctggcgcgtgaagaagttgcgcatcatgctgtgggctgcgcgccgctgcaccttccagtgctccgagtagtggccgaaagccatgctgcggccgccggacaccacacggaaggaggcgaaggccggccggtcggcgaaggccgagccctgctgcaccagggcctggtggatggcgcgctcgccattcagcaccactatggggcagctgcccaggcggatctggaaaacgtcgccgtagcgccgcgccaggcgagcgaacgagaggtgagccgcctggcccaccgccgccgcgtttccgatcagtggccacgcaaacgggcccgggggcgcggaccggagctgccgcctccgttgcctcagcagccgctggcccacatgcacagtggccagcaccgacaggagtagcaggagcgtggtctgctggatggacagcgggtttagc

SEQ ID NO: 40165 - DNA, 761 bp, Homo sapiens; identical to SEQ ID NO: 22874
  chr2:40678936-40679697
  binary

SEQ ID NO: 40166 - DNA, 914 bp, Homo sapiens; identical to SEQ ID NO: 24265
  chr2:42720186-42721100
  binary

SEQ ID NO: 40167 - DNA, 1038 bp, Homo sapiens; identical to SEQ ID NO: 32775
  chr2:43019535-43020573
  hyper

SEQ ID NO: 40168 - DNA, 929 bp, Homo sapiens
  chr2:43864207-43865136
  hyper
cggccgctgcagcaagctctggagtctcgcagttgggacgttaggggtaccactccaggacagagctccctcctggggcagggactgggaggagccaaagttatagccacacccccggtgacgcccggtggtcggctgtggtctcccattggctacaccggctgccagtccctggaggaggcggtgcccttccccgccctctccgagctcggcttgaggcgggcgcgggctgagagtccggggatcccgggggccagtcgcggccgggacatcgggcgctgcggccggggacccgctgctgagatagacaggtgagaaagcccggggacgaggggccactccagagttcctgccaccctgggatccccgcccccttgagggcgccccgtccaggggggctcgcggggccgaggtttggggcgccgggaggagcgggaaggcggggacgagagggacggagcgggctgactcgggatccgccgctgcacctcccgccacagcccagagtcggcccccaagtctggatgtcgccgggagaggtgggcagggggcggtggccggcggtccctcgcgcccgtgggctcccgtgacgttctgtttggaaacactgggcccgggcttctggcgcggcgcgagcggtcccgggggcgcagcggggcagcccagggtccccgagccgagggacccgcgcggtcagggatgccgcgctcgccttaggcttcgggagatccaccaggatctccggggcgaaactttaaactcaaaactttaaagaagcattttgtacacctcgagttgctggcacgtcaaagcaccctaaggtgacctacccggaaaccactgtccccgaagttagtggggcactttttaaaggacaacactttttacccgtcgatattgttgtgcgtaacgctgtggaaatagaagtc

SEQ ID NO: 40169 - DNA, 913 bp, Homo sapiens; identical to SEQ ID NO: 30183
  chr2:45169299-45170212
  hyper

SEQ ID NO: 40170 - DNA, 986 bp, Homo sapiens; identical to SEQ ID NO: 30184
  chr2:45235490-45236476
  hyper

SEQ ID NO: 40171 - DNA, 708 bp, Homo sapiens
  chr2:467981-468689
  hyper
cgcgctgtgcattcagggccctcgtggctctcagaggcgcgtcccaggggcgcacactgcaccttgggctgggcagctccgccgggttgtggcgagcggatgagggaaggacgcagaaaccagggcggaggagccgcgaggggcaggacgaggctgcatgggccagcgagggggtcgacaccgagccagagtgagcgcggggcctggggcgcagagcccgcccagggagccgggagacgccgcgcaagctccccggacaaacgcaatgaccgaggacgcgcgggcgaggccgtccagggagccctggtccctcagctgcaccggactgagccgcgaccgctcagcacgcgctgcttataaatcaggggtgcgcttcccaagccccgggtgaggtcccctacgtcggcacagccttaggagctgcaaagcagcgcgcgcctccggggctcctgcgcgccccttgaaccccgcctcccgcatcctcctgcaacagcctggagctccctgtgcaggacgcagcggggggcggggggcggtcttaggaggctgcggggcgcactcccacctcctgcctccccgagacccccagcgccttctccagggtttagagcggaggtgaaggggcctcgtcctgcaccgccactgggcgcctgggctgttcatcatcggttaccgccgattcataggaactcctcaacacattggctc

SEQ ID NO: 40172 - DNA, 975 bp, Homo sapiens
  chr2:50573691-50574666
  hyper
cgcaccaagcacacccaaatgcacctcccttttgtcgagctcccatttctctgagccttaggagcccaggagcgagtgcagggtagaaagaggggagcgaggggataacccgcgagaacttggcatcgcagacccaccgtgtccgcctcgcaaggatgccggtgacctgtagattgcaataggcactgaatgatgcttgctgctgccatggaaatggtggatgtggtgcgctcccaaactggatgccccccacgccactcctaggaggccgctgagggtgagcgggactatccaaagcagggccaggcgcccccctgcgccgccgccgccgccgccgccgccgccgcccccgggcgagcccagctcggcgccgcaccggagcatcctctggtacatggcggggcgcccgccgaggggcagccgccgcgggaggcaaagtttggggcgcggggagaggagagggcgcaggggagcgggcggcgcggagtgggctgaggggccggccgcctcaccgcgccagggcacccatcctctccctccttcggacagtcttctcggggtcctggagtccgccgtgcctagcaccccaaacaatccgaaacatagccgaggcgaatgcagctggagaggggcttgtccggaaaggcagccccgggaacagcaagcgcggagcgggtggctgctcccagatttccagggctccaggttctcgagagatactcccaaagagtttcgggcgagagtgcgtgccggcgggtggggggccgagaaattgtttaaagctcctcctggaaggtcctcacttctacatgacagacatccaccgcgaatccactaggtaaatccatttagctttgtgtgcggggactagggaggccacttcgccggcccaacctcctttcaagacagaagcagaccccatggaatccaggcgccccttccctccattcagccccggccggctcgcccgctagc

SEQ ID NO: 40173 - DNA, 1251 bp, Homo sapiens
  chr2:5836068-5837319
  hyper
cgggcgggctgcgcggaggctcgggagctggccggggaggggcggatggaggggcctgggttgccagctcccttggtcggggtcctgctcgctggggcttgtgtgttctctgcggcgggccgcgtccccgctgagcctcgcggtgacagccgcctttggcagcgagcgctcggggcacttctatccccgcctctcaaagggtggggacagccgtttccagatttgaattttttctgttctttatttttaacgctgcatcttcgcgtgtgctcagaggtggttgttggcggagaacgccgccgcagtgtttgacctctagcggtgaagggggaaggggaagaggaaaggagagaagtggtcggtgtctgtttccttctgtcccccggggccgtggagctgtcggagggaaggaggacggtgcggggccgcagggggcgcggggcgcggcgggacccaggctacgagcgggagggaggcgggagtcgggggaagacgcggcaggccggccgagggcaccccgaggaacatggcatggcctctgtgcgatccgagtcgcggtctccggggtgcctgggagggccgaaccactggtgagggcgtggggagcagggggtggcagagggcacccgggcggtagtccgggacgcgcaaggcagagccctgacgctccgggtccccgtgcctggctcttcttgcctcgccaccgcgtgctcctgggcgcgccccgccgcgggcccttgaggcgcgcggagacaccagcgctggcttcccgggcccgcgggccggggagggaagcctcggggctgcggggtgagaggaagaaagcaaacccggggagcaggcggctgccgcacccgcgcaccccgggccctcaccacgccctccccgcgcgccggctcaggggctgccccggaatcagctccccggggccgccgcaacgaaggtggatccgcatcttgattgttctccgggagcctcctgggggctccggcggcggcgcgggcgcgacccatcccgctggcgctccccgctcgctgaaccccgtttgcctgtccacaccccctcgctccccaccatttttcctgaccggcctgtgtccccgagccctcgcggcaggcccgagcaggcgatcgcggccgggcacgcgcgccccgggctcccgccccccttccgagcatccgccgcctcttttctgctgggtctgggaggagggaggctgggaggccgctcggggcccagcgtgccagcccc

SEQ ID NO: 40174 - DNA, 670 bp, Homo sapiens; identical to SEQ ID NO: 24273
  chr2:63280967-63281637
  hyper

SEQ ID NO: 40175 - DNA, 213 bp, Homo sapiens; identical to SEQ ID NO: 22220
  chr2:67624288-67624501
  hyper

SEQ ID NO: 40176 - DNA, 163 bp, Homo sapiens; identical to SEQ ID NO: 22221
  chr2:68486689-68486852
  hypo

SEQ ID NO: 40177 - DNA, 807 bp, Homo sapiens
  chr2:68546231-68547038
  binary
cgggcccgctgggagcggcgcgaggccagaggcccttgagaggctcgggctgtcctgggggcctcagtcctctgcctgtaccccatgggggaccctgctgccaccaggcgccccgcactcactcgacctgcagcgtgctgggtttaatcttcacctcaaccttgtaggaggagccggtgagcagcttgatggtgcggttctggccgaagcgctgcccgtccaccttgtaaaagaccgggccgtcattaggctggatgcgcagcgcgatggagaggcgcacgaggcccggcaggtcccccatgtctgggcgagggtctggcgcggcggctccggggggcggaggacagcgccggctgcggccgagtggctggagcgcgaggggcggagaggaagcgcggggagggtgagggaggtggtggagctgaggctgccgctaggaacccgcgccgtcgccgccgtccgcccgggcttttgaggagcagctccttaggctgtggcccccctccccactcggcgaggaagcgggcccaagagacggctccaaggccgcgcgcttccccatcccccgctccagtgctgcgccctccacgcacccgaaggctcgctctggcccgcaggccgccgcgcagatccgcgcagctgggggcgagggagttaatcctgtttacgcaccacaatccccttcagctggggaagcggacatttaggctcctcctagaacagccccgggcaggaggaggagaggtttgggaggcactgggaaggcgctggagttaagcgaccactatgccaaggagcgagaccccc

SEQ ID NO: 40178 - DNA, 990 bp, Homo sapiens; identical to SEQ ID NO: 31672
  chr2:74741799-74742789
  binary

SEQ ID NO: 40179 - DNA, 955 bp, Homo sapiens; identical to SEQ ID NO: 24283
  chr2:74742812-74743767
  hyper

SEQ ID NO: 40180 - DNA, 333 bp, Homo sapiens; identical to SEQ ID NO: 33673
  chr2:80549578-80549911
  hyper

SEQ ID NO: 40181 - DNA, 111 bp, Homo sapiens; identical to SEQ ID NO: 25492
  chr2:85280296-85280407
  hypo

SEQ ID NO: 40182 - DNA, 87 bp, Homo sapiens; identical to SEQ ID NO: 7231
  chr2:88591077-88591164
  hypo

SEQ ID NO: 40183 - DNA, 398 bp, Homo sapiens
  chr2:91635025-91635423
  hyper
cgacttttttcccctgtcgccgcaggtttctcctgccccggcttcttgcccccaccgcccgagctttttgcccccaccgccgcggctatttgcggctatttgcacctgccaccgcggagttttgccccgtatgcggcttccggcccccgccgccacggctttttatcacccccgccgctttttgcccccgccgccgcgggtttttgcccccgcccccgttgctttttacccccgccgccgcggctttctgcccctgccgacgagggtttttgcggctttatatccccgctgtcatggctttttgcggccgtggctttttgccccctcagccgtggtttttttgcggcttttggcacccgtcgccgcagctttttcaggcttttggtgaccgccgccac

SEQ ID NO: 40184 - DNA, 221 bp, Homo sapiens; identical to SEQ ID NO: 22225
  chr2:9481652-9481873
  hypo

SEQ ID NO: 40185 - DNA, 563 bp, Homo sapiens; identical to SEQ ID NO: 27898
  chr2:96192254-96192817
  hyper

SEQ ID NO: 40186 - DNA, 608 bp, Homo sapiens; identical to SEQ ID NO: 25497
  chr2:97193030-97193638
  hyper

SEQ ID NO: 40187 - DNA, 316 bp, Homo sapiens; identical to SEQ ID NO: 22228
  chr2:98377004-98377320
  hypo

SEQ ID NO: 40188 - DNA, 662 bp, Homo sapiens; identical to SEQ ID NO: 24291
  chr2:99438949-99439611
  hyper

SEQ ID NO: 40189 - DNA, 83 bp, Homo sapiens; identical to SEQ ID NO: 33681
  chr2:99798661-99798744
  hypo

SEQ ID NO: 40190 - DNA, 197 bp, Homo sapiens; identical to SEQ ID NO: 25504
  chr20:18489643-18489840
  hypo

SEQ ID NO: 40191 - DNA, 1359 bp, Homo sapiens; identical to SEQ ID NO: 32792
  chr20:21080357-21081716
  hyper

SEQ ID NO: 40192 - DNA, 1300 bp, Homo sapiens; identical to SEQ ID NO: 26817
  chr20:21085683-21086983
  binary

SEQ ID NO: 40193 - DNA, 1245 bp, Homo sapiens
  chr20:25064486-25065731
  hyper
cgaccggggtcgcccgcgaatggaaagcctaaggggcgagggcggacgcgggcgccgtgcctgcagccccgggtgccgaccaagtggcctcacctgggacaggtcttggggtctccctcccctaggtctccctggaaggtaggcgatcacgggagtgacagaccccgagtagatagccagtgatccaaagacaccaaaaggccaggcggtaggagcccagcctcagacactctctatagtgaccgcggcgcctcgggaaggatcgtcttaaactcattttgcaggtgagagcaactgggacttattaacccagtcacatcggacacagagacgtggcgagggcgacacagagcaggagactcaatcaaggagcccgtattggagctctaaggggactcagagatgcagaaggaacgaacttctaaggggtcttgcaattcctggactggggcgttcctaatgcatcccgggaccccaatgccagggaggggcctgcaggaccccagcggtgggcgagttgtgtcctgggtcaccttgtgtttcgcagcgtggcggtggcaggagcccagcgcgggaggacattttcatagcctcctacagtgagaaacgccccccacccgacgctgcgctcatctgtgtccccgctgttgccggggctctggtatccacttgcgcgccctatgtggtggggatccacccagagcccagcgtcaagttatacgggcgcttcactcagcgtcagccaagaccagggaagcgcttcttgccgtttaggagacgtctgcaagagataaaaagctagcccacgatccacccacaatcctcgtgtccccggggtgccctcgcagttgccaaacctacgggccgcgtttaggggaagcctccgcgtcctggcggccaaaagaatgggctccttccagcttccccctaccggataccacctgcaaatctattgccagaggcgcagctcccgcgaacgttcccgccccgggcggcccccaggagtcgttttgggtccctaaatccgttgagggttccgaatctgtcttcatcagccaggattacccgggatttaactaatgaataaaggttcctcagctcattattttctaaggaagatttccagcccctctgtcgccgaccgcgaatgtgccttggcagcgccaggctgaggttggacctgctgtgagtggctcagcaggcacccctcttgggcttctcagagccgcggctggccaggctggc

SEQ ID NO: 40194 - DNA, 160 bp, Homo sapiens; identical to SEQ ID NO: 25508
  chr20:2668754-2668914
  hyper

SEQ ID NO: 40195 - DNA, 766 bp, Homo sapiens; identical to SEQ ID NO: 30221
  chr20:2780877-2781643
  hyper

SEQ ID NO: 40196 - DNA, 650 bp, Homo sapiens; identical to SEQ ID NO: 26823
  chr20:3052452-3053102
  hyper

SEQ ID NO: 40197 - DNA, 1356 bp, Homo sapiens; identical to SEQ ID NO: 27909
  chr20:30639044-30640400
  binary

SEQ ID NO: 40198 - DNA, 270 bp, Homo sapiens; identical to SEQ ID NO: 22235
  chr20:30772699-30772969
  hypo

SEQ ID NO: 40199 - DNA, 987 bp, Homo sapiens
  chr20:34188865-34189852
  hyper
cgtgttggaggggagcgtggggagggcgagtgctggtaaatctctgcacctcaccctgatctcctccaagtattcgggggtgagggcaggggaggggggctaagccgctctgaaacggaagaagttggccagcagctgcggacgcgccgctgtggaacacgacctggggcgcctccaaaacagctcagcgccccaaggagctggaaatcgcgggagcccggcctcgggggacgcagcctgagccctgggggcggggtcgggattggggcggagctacgggcgatcggccaggcctgggggtcggggaaaggagtggaccggcagtgtcagcgtgtgcacagctgtagaagggtgggactgggctggttactggacaggcggttgtggtcagaattttgccaacggagccaaaccgatggtggggttcacagtctgggggcggcttgaagcagtttgttttgcgggcggaccagccctcctaggcggagcggggtcgcgaggatggggcttgcggttgggaatgggccctatggagccctatggaccgaggcgagtgaggccagatttgccgcggccagaagcgctcacccgcgcggcccggatgggagatccgcctcaggtccggcacgtgcgtagcgagtgccgcgtcgaccaggggcgcgtcgtcccgcagctgcaggcggaggctgcgcgtcagcggcgggaagagctccacgaagctcagctgctcgttccattcgggcgccgccgcctcggcgctcaccgacgtctcgccctgaaggtggcgttaaagacaggagaagggagatcagcgcggagtcggggccggagccgcggcgccgtgggccccggagggacttacctcctgccccaggaaagacacccgcacatagggctccaccaggacgcgctggtcgtgcagggcgcggaccaggctgcccagcagccccaggcgcagcgcgggaagcccctcggcgcggtacaggc

SEQ ID NO: 40200 - DNA, 846 bp, Homo sapiens; identical to SEQ ID NO: 33692
  chr20:35443740-35444586
  hypo

SEQ ID NO: 40201 - DNA, 161 bp, Homo sapiens; identical to SEQ ID NO: 7242
  chr20:36802873-36803034
  hypo

SEQ ID NO: 40202 - DNA, 790 bp, Homo sapiens; identical to SEQ ID NO: 22883
  chr20:37302417-37303207
  binary

SEQ ID NO: 40203 - DNA, 847 bp, Homo sapiens; identical to SEQ ID NO: 35743
  chr20:37435071-37435918
  binary

SEQ ID NO: 40204 - DNA, 785 bp, Homo sapiens; identical to SEQ ID NO: 25522
  chr20:3758188-3758973
  hyper

SEQ ID NO: 40205 - DNA, 1325 bp, Homo sapiens
  chr20:41817869-41819194
  binary
cgcgcgctgcccgaggagctgcccgggagagaacgctccaccccgggcgtcggtgccgctcctcgtctcgccgccccaaacactcaagtggcagattccgacaagtgggaggcagcaagtggaaatattcgcaacaaccgcggaaagttactccagcccggggggccggcaggaaactgaagcggggaacttcgccaaacgcgggctgccgagggacgcgaggggccgggctcgctggccggggcgcgcggggacactgcttcccgcgcctgcaagctgagacccgggttccggccatggggacccgcgcccccgcgagcccacacaactttctcctccgagggccccgcggctgggggcccgcgcgcatccaggagggagcggggagcccaggggagccgggcgggcgcactcacctgcggcgctctgagcccgggcgccgggcagtggcggcagctgcagcctcaggagcaggctgagggcgagcgcggcgaggctcgccatccgggcggcggcgggcagctcagccccttcccgcgggggccggggccgggactggggcgggcgcggggtggccccgcatcgccggcgcggccgctggctgtgcgcgcggctggctccgctcgggctcccggagccggcgctcctgcgttccaagccgaggcgcggcgcgaactgaggcgggaggctgggcgggggcgggacgcggggggcggggggcggtgtcccccgagtcctaacgccgccgccgttgccgccgccgccgccgccgccgcccgcccgggcgctccgcctcggccgtgcacacaccctcacgcgcacgcccgcgcctggcacacgcccgcggctggcacacgcgggctcccccgcgcaccctctccggggccgaccagctcgggccgctggcacagtcacgcgcgtccacacatcacccccgcacccacacgccgggcagggtcctcgcctcttcgccccgcgccgcgccgcgcagccaagcatcgtctgccctgtgggggcgcaggtacgggggcggtgcggggaggaggaagctgcagcagccgtttgaactcggggtggggaacaggtgaatgggggttcggtggcgagaagagggagggagggagcagccctcgcaactcaagataaggggccaggtgaattgcgaaagcgggtgggggcgtctgcccaaagctggggcaggcggctgctggccagggtctcgggcacaccctgagatgagaatttcatctaagagcgcgcgcgcgcacacacacacaacccactcacactcttctgggcgcatcgctgaccgcgccacaatcgtc

SEQ ID NO: 40206 - DNA, 78 bp, Homo sapiens; identical to SEQ ID NO: 26836
  chr20:44602349-44602427
  hypo

SEQ ID NO: 40207 - DNA, 455 bp, Homo sapiens; identical to SEQ ID NO: 13887
  chr20:46234984-46235439
  hypo

SEQ ID NO: 40208 - DNA, 314 bp, Homo sapiens; identical to SEQ ID NO: 25525
  chr20:46823362-46823676
  hypo

SEQ ID NO: 40209 - DNA, 50 bp, Homo sapiens; identical to SEQ ID NO: 15865
  chr20:47766299-47766349
  hypo

SEQ ID NO: 40210 - DNA, 224 bp, Homo sapiens; identical to SEQ ID NO: 24313
  chr20:47905365-47905589
  hypo

SEQ ID NO: 40211 - DNA, 75 bp, Homo sapiens; identical to SEQ ID NO: 20497
  chr20:48350342-48350417
  hypo

SEQ ID NO: 40212 - DNA, 186 bp, Homo sapiens; identical to SEQ ID NO: 33702
  chr20:48771177-48771363
  binary

SEQ ID NO: 40213 - DNA, 745 bp, Homo sapiens; identical to SEQ ID NO: 25530
  chr20:50157660-50158405
  hyper

SEQ ID NO: 40214 - DNA, 1658 bp, Homo sapiens
  chr20:50720375-50722033
  hyper
cgagcaagctttattttaacatataagctattcgtttagtggaggcttcattaaactactcccctccaccaccacctcgggaagttgtggtcaaaacccaccagaccgactgtggtggaagttgatgcggaagctggagagcccgcggctctggaggggtgagccgccccggagaggggacccatcctcctttccgcgcccggaaagagcgggggagaagaggaagtccagttacaactcctttcctcagccccttaaaggaaaggtatcagctaaccacggggagctggcagcctaagagaaagtaggaacctacaatctcttaatctaagcacaagataagcaaaaagggaagcgccttagaaatgcagattccccaaccccacccctgagattccagtggaggcgggggatggggggatccctaacttgcaggaagaatttggcgagcgagaaaaggtcccctcccgcaggctcttctgaagcggaggatcccgggacgagaaatgctgcccggggggcttaaggtagccgacgatctccttgctacatcctgtgtccacgtggcagccgaggagggggtgtgggggccgcctgttaagtgcgacagcatcactgctctatccccaccacggctcccacttcgctcagataaaatgcagagctcttaccaaggctcacggccgtcccccgccccccaccgtctgcccccatcacctctcgggcctccggtgacctctcgggctacagcagcgctgacgccctgggtccctgcgcttctgttccctcggcctggaatgctcttcccccgggtacctgcacagctcgctccctcccatccttcgggtcttcgctcgaacgtccgctcctcggtgaggccttccctggacaacgcatttgaaacgtaaccccaaggcaagaagccaccttccaggcgcgcagccgaagcccagtgccaaggaggccggagactcgggtgcccgcgcatcccgaaaacagcctctgaggggtcctctgagcatccttccagcgtgtttgggaggcaaactcgttgactagctcttgagaggagtggctagaggaatccaggcggggaaggggacggtggactccaggagagtgtaatttacaaaggcggggggcggggacgcccaggtccgagtcccaggactctgcgccggacgcttcgcccgccctttcaggtcccctgcccggtcctcgtacccgcgcgggtccggagaacctctgagcaccggcccccagcccccgggcggggctccagcggcgctactcacccggctcccccgccacctgcggggccacctccgcacactcccggcgcgcaggccgcggctcctcggagttgaggtgctggggcttggcctgcttgcgccgcgacatggcgcgaggaccgggctccccgcgcgtccctaggagtggcctacttcacacaacgaattcccggagttcggaaattaccccccttcggccggaacgcgcatgtcccggcaattctgctcatcagccgagcagggcgatttatcaagagtcctgacggctgattggcctggagccaagaccccaggagtcccgcggacttgcggtccgctcccgggcagcccgcgccacctgggagctcgttagaaatgcagactctc

SEQ ID NO: 40215 - DNA, 116 bp, Homo sapiens
  chr20:50722093-50722209
  hyper
cgcatgcacattaaagtttgagaaaccgtgtctgcattttaacgagatccccaggtgattcgtttgcccattaaaatttcagaagcgcagctctcctccaactttaatgtgcgcac

SEQ ID NO: 40216 - DNA, 520 bp, Homo sapiens; identical to SEQ ID NO: 25532
  chr20:50722287-50722807
  hyper

SEQ ID NO: 40217 - DNA, 849 bp, Homo sapiens
  chr20:54578093-54578942
  hyper
cggagcaccaggtcgctaaacagcagctacagcttccgtcagctcttcccctactctcatcaacctcaaagtctgtctttccccagctatttgcaattctctgaaaggacatgagcccgggaagggagaactggctcccaagcgctttcctacaggagctcagcgcagttgccaaattccttttcctcccctcctccgcaacttttctctaagtaccggagaagggcttgctgcctactccgaggcagcggcagtgccagcggtgcctggcacacgaacagtggaacctgcaggcgagatctgacccccggctctgcccccgccctccgcggccacctgcccgatctctgaagagtgtggaagcccggggctctcttgggagagaagcttctctacctgggagaaacaaatcaaacatttatcctgttccgcaaaggtacccagggagcagcctcagcggcacccgcagaggagtctgagcaagggcaccaagatctggccaagagataacgacgtccagggaccaggtgcccttcggctcccgccgacctgttgctcgaaacttgccctgagctctcgctgccgggctctgggctcccaagcctctcccccgccgccgcagcagcctcttttaggggcccggaagaaatgggagccggggctggtgagaggggtaggaagagggacggtagaagtttcagacccaggcatatttgggaaggcgagtgctttacatgattccccatttcccaatcggaccagcttagcctgggcaggcagcctcgtgctgaggtgcctggagaccgcccaccccctaggtgctcgcttccccccgggtctgacctgatc

SEQ ID NO: 40218 - DNA, 976 bp, Homo sapiens; identical to SEQ ID NO: 39149
  chr20:55205893-55206869
  binary

SEQ ID NO: 40219 - DNA, 381 bp, Homo sapiens; identical to SEQ ID NO: 26847
  chr20:56772009-56772390
  hypo

SEQ ID NO: 40220 - DNA, 307 bp, Homo sapiens; identical to SEQ ID NO: 9562
  chr20:56941603-56941910
  hypo

SEQ ID NO: 40221 - DNA, 942 bp, Homo sapiens
  chr20:57089405-57090347
  hyper
cggtcccactgggcccggcacaaagggcagctctgggtacctacaggccaggccccgactggcgcagagagtgcagcggctctcatattgcgaggtgacgcgactccctcccgcaggccccaggaagctcctggaggcgcgcaggtgccggccaggtgagactggagaaaggcgcgcagggcgcagcatagcagccgcgtgggccgacccagggccgtagtccccaagggcccttaggggacattagacggcgagctccctcccttccgagctcagccagtttgccgggtgggggagggtggcacctacctcccaaaagcaccaggacgcaagcgtaggggagcatggctgcgggcatcccgtcggggctggcaggaccgcccgccgggcgctgccacggtgcgcaaggggaggcgcgggcgcagggctctcggacggctgcgggcgccggcggccaggctggagtcctgcgaagaagttgcgagggtcctgcgcccccctcggcgctcacacgcgctcagccttcccggctgttgatagttgtaagcggagctgcgcactcataggtccaacttgccagaagaggtggagacagcccccggcgaggcgcgcacacccgcgcagcgcgcacagccccctggtgcagctcctgccattcagacccccagccctcccccagatgtccgtcccctggccgtcgccttccccaaagtcttcgcagtgggcaaggaggcctcccccaagctctggtcccggccaaggcagagcgatgcgctccttgcgtcaaagcgcacccctagccaggccgttccctggaagggcaagcggggcggggagttcctctaagccccgccagtcctgggacccctgaagtttctattcaggtcttccagctactcctggaaaagtcgcgtcaacttggatcccagcaaacccagaagc

SEQ ID NO: 40222 - DNA, 982 bp, Homo sapiens; identical to SEQ ID NO: 25536
  chr20:57224597-57225579
  binary

SEQ ID NO: 40223 - DNA, 933 bp, Homo sapiens
  chr20:59828327-59829260
  binary
cgggagggcgccccgggagggcgagcgggtctcccgctgcctctgcagagccccgcgggccggattgccagctttgctctgcgcctggcgaggtgcgcggcccgcgggggcagagagcgcggcggctccgggggcgcccctgggcggaggcggaggggcggcgggagttgcaggaaccccctctcgtggccgatcggcctcgctgccttctcccgggcagcgctgttgtaacctcggaaataaacaagtgccagcggcgggaggcccgctccgaggccgcggggcgctgggggacgcgctgggcacacgcttcgggcgggcggaaactttcctgggcgagttgagcctcccaccgggctgcgggtgcgatttggagcttcgtggccgatgaagaaagccgcggtttagagcttttcgtaaggaatgaccctgcgtcccgctctcctccctcggtgctgggggtagaggggcgccctccgcggtgccggcgtcgggaagcctggagctccgggctgggggcggcctccggagtcgaagcatgggcgggcgacggcagcgcgcggagctggaggaggcggcgggcgggaggcgccactgcccggtgcgggctgcacccgaggcttcctgcgctcgccggggagccaagcaccgctgtgctcctgctccttcagcggggctggcttcccgcttgcacacactgcctctccctccaccacctcctcctgcctgtcacgccccctcccagaagcttggtcggagggccctgtcgtccaccccatccttccctggccctgtgccatgggctctagacttccccactgagcaggaaaggcgagcgagctccggaggacaggaggagaccccctttccggtcagttaggggagccgtctccctgcctgggctggagatgggggctccgagggtgaaaatgc

SEQ ID NO: 40224 - DNA, 593 bp, Homo sapiens
  chr20:61314263-61314856
  hypo
cggccagcatcctcgccagtccagggccacacagtggtctctttctgtgctgagctggaggctcgaggccgcggatggaccctgaagctgcgcaggctgtgagggcgccctggtgcttcctctcagtgtcagctctttggggaacacaaaagatgaaccatagggagcgattactcagaaccataatttgcacttagattgattttaatcggcagcacattagaaaggcgcatgtgatcaccgtttaatgactgtgatgtgcgtaatccattttattctcagctggctcctgtggtaattacatttctcttgtgtttaattcataacttgatcatttattccaagtcgtgttgggcttggacctcgggctctcgggagcggccgtgacggagctcagacccagcacttctcctgcagagccagccgctcgctgctggccatgcctggaggtggcgaggacgggcttttccatcactctcggtgggggcacctgctccaggggcagctccatgggcgcttggcgggacggaagctgcgggaatagttgatgttgaggttgacggcgacagtgaggactgcaagaatacagtcac

SEQ ID NO: 40225 - DNA, 242 bp, Homo sapiens; identical to SEQ ID NO: 33721
  chr20:61990858-61991100
  hypo

SEQ ID NO: 40226 - DNA, 765 bp, Homo sapiens; identical to SEQ ID NO: 24333
  chr20:62383436-62384201
  binary

SEQ ID NO: 40227 - DNA, 379 bp, Homo sapiens; identical to SEQ ID NO: 22256
  chr20:62384600-62384979
  binary

SEQ ID NO: 40228 - DNA, 219 bp, Homo sapiens
  chr20:62868754-62868973
  hypo
cgccccccgctcctgggctctttgcccacccaacccaaacattcgtcttggggacagtgaggcatccgtcggcactcatcaaggttgctgtcagggctgagctgacggacagcgcagtggctggcacacaggcacacttaggacgtgctggccgctcacaatgcggagtccgtgaagtcacactgtgagtgccagtgggccgccggagctggttgtccc

SEQ ID NO: 40229 - DNA, 71 bp, Homo sapiens
  chr20:688339-688410
  hypo
cggcagtcctggtccctgggcattgccgaacacgcgtcctttttttcttttcttctttcattattatgatc

SEQ ID NO: 40230 - DNA, 55 bp, Homo sapiens; identical to SEQ ID NO: 15892
  chr21:30294975-30295030
  hypo

SEQ ID NO: 40231 - DNA, 466 bp, Homo sapiens; identical to SEQ ID NO: 22260
  chr21:30374936-30375402
  hyper

SEQ ID NO: 40232 - DNA, 1903 bp, Homo sapiens; identical to SEQ ID NO: 24337
  chr21:36041402-36043305
  binary

SEQ ID NO: 40233 - DNA, 176 bp, Homo sapiens; identical to SEQ ID NO: 22261
  chr21:36437239-36437415
  hypo

SEQ ID NO: 40234 - DNA, 174 bp, Homo sapiens; identical to SEQ ID NO: 15895
  chr21:38176483-38176657
  hypo

SEQ ID NO: 40235 - DNA, 903 bp, Homo sapiens; identical to SEQ ID NO: 24339
  chr21:38592864-38593767
  hyper

SEQ ID NO: 40236 - DNA, 349 bp, Homo sapiens; identical to SEQ ID NO: 26868
  chr21:38918381-38918730
  hypo

SEQ ID NO: 40237 - DNA, 361 bp, Homo sapiens
  chr21:38936049-38936410
  hyper
cgggggccgcgagccgccggcgtaggccgctccagctggaagaccccaccgctagggttccagggggctgcggacgcttccgaggggcccaaggcgaaagaacgcagcccgcttgtcggccacgtgaccgtccccgtccgcgtccgcagcgaccacgtgactgtgcgtccgcggcgtcgattgactgggagctccctggccacgccctaagcgccagccccgggcttcggggggcggtgctgctgcggttgccatggcgtcttccgagcgcgcaggcgtgggcccagagtagcttttcgggtatttgctaccggctctcggtagggctggtcacctttgcttgctgagcttcgcgccctgc

SEQ ID NO: 40238 - DNA, 967 bp, Homo sapiens
  chr21:42879178-42880145
  hyper
cgagccgggcaggacaggatgaggtggaccgaagcgcccaggtgccccgccttccccccaacccggcacggagcgcaagcggaggagccagaccggctcctcccgggcgggttcctgccggtgccgggtgtccaggaggccccggccctgatcgccgccagcgggtcgccgcaacggggcctgagtcgcgagcagtccctccccgagactgactggccgttcgcacctcgcccgggggccctccagcagcctggcccagcggtccccgccgcgccggccgtatcgttcccggcatctcagcgagtttccagtttctccctacctcagtagggaaccaagaagcagaaggagttcaggtaacactgcgggactgcagagatttcccccaaacaaagaagccaaccgacagcactcccagtcctcctccccaaagagaaaaggcgcaccggtgctcccaggcgggggccgtggagggcaggcggactaggagccagctttggggaccccgggggactctcttccaccaactggctagggactcgcaggaccacctgccccaacctcgcgatgccaagccaacaggggcggcgagggctctcggccgtgcgcaaggggtcccaggcgcccagcactctcccagcaccccgggaggcgccctgcccggctggccccagcgctcgaccctcgggcgcactcacctgccgcgccgcgctcctcacacccgctttcacctccgggcggggcagggggcatcggcgggtcccaggcgcccaggttcccctccccagcccggaccccgagccgggaccctggtaccggcgccgctcacctgccgcgctccaggcggcgctccccgcccctcgccctccgcctccgcctccgcctcctgcttagctcgcgcctactcggcccggcccgccctggctctcgctttaatctcaggaggcggtgtcccagggtccagggc

SEQ ID NO: 40239 - DNA, 396 bp, Homo sapiens; identical to SEQ ID NO: 15904
  chr21:43547667-43548063
  hypo

SEQ ID NO: 40240 - DNA, 637 bp, Homo sapiens; identical to SEQ ID NO: 33744
  chr21:43991061-43991698
  hypo

SEQ ID NO: 40241 - DNA, 209 bp, Homo sapiens; identical to SEQ ID NO: 15908
  chr21:44444714-44444923
  hypo

SEQ ID NO: 40242 - DNA, 378 bp, Homo sapiens; identical to SEQ ID NO: 31752
  chr21:44866567-44866945
  hypo

SEQ ID NO: 40243 - DNA, 867 bp, Homo sapiens; identical to SEQ ID NO: 24342
  chr21:45148293-45149160
  hyper

SEQ ID NO: 40244 - DNA, 255 bp, Homo sapiens; identical to SEQ ID NO: 24348
  chr21:46036558-46036813
  hypo

SEQ ID NO: 40245 - DNA, 1563 bp, Homo sapiens
  chr21:46351328-46352891
  binary
cggacaggcggaaccgggccatcagccgtccctgcgcacagaggcgcacagattggatccggcctcgcagtcccaggagccaagaggggaggcacgcgtgccggttctcggaaattcattatgggaatgtgcgcgttgtggagatgctcagaccgcgaacagtactgcgggaacccaaacgatcatttttaaccccagacgtccctgaaccaaagccaaagtctacaggtcactggggcagaggccgcccgaaaccagctgtcccctcccggcctaggcgcgccaggtccccgcccagccggggcgatcctttggtcggacagtgaggttgggagcccaccgcacccaagtgccgccgcatccacccggcgcaggcgacccccgacgggcagccgctcaccttctcctggccccgggcttcaggaaaactgcctggaggtggccggggtctccctagcggaggctgggcggcgggcttcgcgcctgcctcagtctcccaatccgtggcccgggggatggagcccgctgcgcgcagaggctgcggcaggtcccagccaggtgccctggaacgtggctcctccttccctgaggcgctcccctgggcacgaggatgggtctcgaagcaggaggaagccgccttccctcacccgctgtccggagctgctcagccggtgcgcggagcctcccccgccgcggacaccacgatccgacccccaccctgaccccgacccagacccccaccgcccgaccccggccgtattccgttgcgtttgctccctgccagctccggggccaccactgagcacgcgctgtgagtaggcgcttcctggagcttttcctgggggtcctcagaaaaacccctgccgtccccattatagagatggggaaactgaggctcaggaaggccagagcttgcccaaaacctgcggtccgcggcgggcagggattccacgctccgagcctggccgcctccctggggcgcgtgaagggagctttccttccccgggaaaggccggggccagagacccgcactcggaccaggcgggggctgcggggccagagtgggctggggagggctgggagggcgtctggggccggctcctccaggctgggggccgccagctccgggaaggcagtcctggcctgcggatggggccgcgcgtggggcccggcggggcggcctcgggaggcgtccaggctgcgggagcgggaggagcggccgtgcgggcgccagcgccgtgggtggaggtcgccgtccctcctgaggggcagccggtgcatttgggacccgggagcagagcccgcgcctccccagcggcctccccgggggtctcaccgggtctcccgagagcggaggccccggctccgcagaaacccggggcggccgcggggaagcagcgccctcaggcgtcggaggagcccccagaaggacctcgcgcctccccgccgggctccgaccgcctgggttcggtgcgggacggcccaggccgccaggacccccaagcgcagctcagtctgcggggcacgacccagaggccagcagcagaggacggggccggggcc

SEQ ID NO: 40246 - DNA, 213 bp, Homo sapiens; identical to SEQ ID NO: 24364
  chr21:47328415-47328628
  hypo

SEQ ID NO: 40247 - DNA, 648 bp, Homo sapiens; identical to SEQ ID NO: 24368
  chr21:47602441-47603089
  hypo

SEQ ID NO: 40248 - DNA, 406 bp, Homo sapiens; identical to SEQ ID NO: 22279
  chr22:19830509-19830915
  hypo

SEQ ID NO: 40249 - DNA, 151 bp, Homo sapiens; identical to SEQ ID NO: 25577
  chr22:21153882-21154033
  hypo

SEQ ID NO: 40250 - DNA, 201 bp, Homo sapiens; identical to SEQ ID NO: 8436
  chr22:21977477-21977678
  hypo

SEQ ID NO: 40251 - DNA, 530 bp, Homo sapiens; identical to SEQ ID NO: 32827
  chr22:22899582-22900112
  hypo

SEQ ID NO: 40252 - DNA, 1452 bp, Homo sapiens; identical to SEQ ID NO: 36703
  chr22:24551659-24553111
  binary

SEQ ID NO: 40253 - DNA, 875 bp, Homo sapiens; identical to SEQ ID NO: 34767
  chr22:25678576-25679451
  binary

SEQ ID NO: 40254 - DNA, 1160 bp, Homo sapiens; identical to SEQ ID NO: 30273
  chr22:27053098-27054258
  hyper

SEQ ID NO: 40255 - DNA, 617 bp, Homo sapiens; identical to SEQ ID NO: 39167
  chr22:27068622-27069239
  binary

SEQ ID NO: 40256 - DNA, 851 bp, Homo sapiens; identical to SEQ ID NO: 24378
  chr22:31480666-31481517
  hyper

SEQ ID NO: 40257 - DNA, 791 bp, Homo sapiens; identical to SEQ ID NO: 22287
  chr22:34316250-34317041
  binary

SEQ ID NO: 40258 - DNA, 302 bp, Homo sapiens; identical to SEQ ID NO: 33760
  chr22:38199688-38199990
  hypo

SEQ ID NO: 40259 - DNA, 868 bp, Homo sapiens
  chr22:38476934-38477802
  hyper
cgccatgagcacctcgaactgcagcgcgcccaccatgccgtaggagaggccgaaggcgacgcagaaggcgacgagggcgccgtaggagcgcgcgcgtgcgctgctcaggtctgtgagcccattggccagcagggccaggctgaacagatacgggacgtgcggccgcagacgcgccaggcccgccagggcgccgcacgccgggcgcgccacgatgtccacgaagcccacgatggacagcaggaaggcggcgtcggtgtcgggcacgcccgcgtccttggcgtagttcaccagcaggatggcggggacgaagagcccgagcgccatcaggaacttggtgacggcgtacacggcgaaggcgcggtcggtgcacactgccaagtccagcaggcgccggcggggccggaccctgggggatgcctcgcgcagctgcagccccgcaccgtcagcctccgcctcgcccggagcgtccccggcgcggtcgccggcgctgtccctgcgcggtcgcgggcccggcccgggcggcggcctcatgacagccccgcaggcgcagcagtgcagcaggagcccgccgagcagcaggaagccgccgcgccagccgaagcgctccagcagctgctggccgagcggcgacagcgcggacaggaacacggggctgcccgccgccgccagcccgttggccagaggccgccgccgctcgaagtacagccccagcatgatgagcgacggctggaagttgagggccaggcccaggcctgcgggcgaggcggtgctgtgccggggtccccggagagcccctccctggcccccacaggagggaggggccaggcccgggaacccagcagatccgggaacccagccgagggacttc

SEQ ID NO: 40260 - DNA, 181 bp, Homo sapiens; identical to SEQ ID NO: 24381
  chr22:39877241-39877422
  hypo

SEQ ID NO: 40261 - DNA, 32 bp, Homo sapiens; identical to SEQ ID NO: 24383
  chr22:42109076-42109108
  hypo

SEQ ID NO: 40262 - DNA, 450 bp, Homo sapiens; identical to SEQ ID NO: 23217
  chr22:42353588-42354038
  hyper

SEQ ID NO: 40263 - DNA, 123 bp, Homo sapiens; identical to SEQ ID NO: 22288
  chr22:45581821-45581944
  hypo

SEQ ID NO: 40264 - DNA, 61 bp, Homo sapiens; identical to SEQ ID NO: 22289
  chr22:47441113-47441174
  hypo

SEQ ID NO: 40265 - DNA, 99 bp, Homo sapiens; identical to SEQ ID NO: 15930
  chr22:47441200-47441299
  hypo

SEQ ID NO: 40266 - DNA, 398 bp, Homo sapiens; identical to SEQ ID NO: 20542
  chr22:47534595-47534993
  hypo

SEQ ID NO: 40267 - DNA, 774 bp, Homo sapiens; identical to SEQ ID NO: 26916
  chr22:50623263-50624037
  binary

SEQ ID NO: 40268 - DNA, 434 bp, Homo sapiens; identical to SEQ ID NO: 22292
  chr3:100120034-100120468
  hyper

SEQ ID NO: 40269 - DNA, 148 bp, Homo sapiens; identical to SEQ ID NO: 24390
  chr3:101230942-101231090
  hypo

SEQ ID NO: 40270 - DNA, 858 bp, Homo sapiens; identical to SEQ ID NO: 25619
  chr3:10206343-10207201
  hyper

SEQ ID NO: 40271 - DNA, 73 bp, Homo sapiens; identical to SEQ ID NO: 23219
  chr3:10547178-10547251
  hyper

SEQ ID NO: 40272 - DNA, 871 bp, Homo sapiens; identical to SEQ ID NO: 23222
  chr3:117715822-117716693
  hyper

SEQ ID NO: 40273 - DNA, 79 bp, Homo sapiens; identical to SEQ ID NO: 20548
  chr3:12605281-12605360
  hypo

SEQ ID NO: 40274 - DNA, 736 bp, Homo sapiens
  chr3:127794537-127795273
  binary
cgcggcgggggcggagcctgggcccgaaacgccacgggcgcgactctgtgcgcgtccgcccacacgggggcgctgtgtcctcgcaagctcccgcggggtgcctcgcggccctggaacgctgtggttttcgaggggaaaagtgagagtggctggtcctgcctccgctgccgcttggccctgagatccccactgcccacgggataggccccagtccacccagccggggccccccccttcccctcgtctcgctctccttggcagttcggacttcgggtcagtcccacactcgcgcccggctgtccctgctgcgctcctgtcactggcattgggaagccctccggccccctctctgcacacctggcacacggctcctccctggcggcatgtgggtatttgggttgggcgagcctctccctcccgattcccgagttccgagtgggtcccggcggaccagcgctattctggaggggcagtgcctcagaggcaggtcgcttcgagtggggatttgtgcgctctggcgcggaggaggggggtgggaagccggctcttgccctcctcacccggtggggagcgagcagggccaacggtgcgctgagagcgctcagggcgtccccaacagcatgacccgacccagggacgaagctctgggggacgggaccacttgcgatgacagctaaaggagcacaggggggcggccggcatggagaggcggggccggcattcctgcgggcctgcc

SEQ ID NO: 40275 - DNA, 778 bp, Homo sapiens; identical to SEQ ID NO: 24399
  chr3:128216313-128217091
  hyper

SEQ ID NO: 40276 - DNA, 809 bp, Homo sapiens; identical to SEQ ID NO: 30301
  chr3:128273847-128274656
  binary

SEQ ID NO: 40277 - DNA, 1542 bp, Homo sapiens; identical to SEQ ID NO: 25625
  chr3:129693123-129694665
  binary

SEQ ID NO: 40278 - DNA, 788 bp, Homo sapiens; identical to SEQ ID NO: 24403
  chr3:13611739-13612527
  hypo

SEQ ID NO: 40279 - DNA, 333 bp, Homo sapiens; identical to SEQ ID NO: 24404
  chr3:13679108-13679441
  hypo

SEQ ID NO: 40280 - DNA, 961 bp, Homo sapiens; identical to SEQ ID NO: 26936
  chr3:137479995-137480956
  hyper

SEQ ID NO: 40281 - DNA, 33 bp, Homo sapiens; identical to SEQ ID NO: 15934
  chr3:141664320-141664353
  hypo

SEQ ID NO: 40282 - DNA, 185 bp, Homo sapiens; identical to SEQ ID NO: 22304
  chr3:141868994-141869179
  hypo

SEQ ID NO: 40283 - DNA, 291 bp, Homo sapiens
  chr3:147074930-147075221
  hyper
cgcttccaacccagagagggcgagggtagcgcttggaattttgagattgggctgtctggcgcggcttccaattccagtcttttccgccaggcgcggctccagtttagaccgcggcggtggtctaaattcttcgcctaaggaaccaccgcctaaggaacgatttgccatcggatttgtcctcggcaaatgtctcaccaagctgtagatggatgaatggatagatacatgataggtagatcgatcgatagatagttagagaggtagacagacggatagatccccgaagcttgc

SEQ ID NO: 40284 - DNA, 1158 bp, Homo sapiens
  chr3:147086665-147087823
  hyper
cggtagcatgctctcttgtcaagaccgattgtgttttaggcaaacatttgcgcaaacataaaggcaaaggtcaaggactgttcagtcccagtatgtgctaattcacctagcgaaccaatggggcaaaagttgcattttatatgctcgcccccgccagacccaaagcaggagtcgctcctgctaatgaacaaaatcgcctctgatcagctcccttgtcaatttctcttcggctctctgatccatttctctgggcttcctcagaaatacaactggtaaagacgtgtttgccaacatctggatcagctccgcccaatttctggggcagcacatgtttattccacgtttctggtagcagaaagctaataataataaataaaatctagcttgctgcagacgcttgcaggtactcaaatgaaggattgctcattgctggcgtctgaatatccatgccatgcagaaaaacaatattatttaaacctcagaatcgaatctcaaagctgcaggttagtggcaggaaagtgcatttgtaacacacgtttgtggaaatgtggtatgcgcgcgcactgggagccgcgtttctttgggacacttccctacgttcagcgaatacagggcatcactttccagtgaaatatgcctcccccaccaatatatctacaccgtctcccacagataatgccagttatttttccagcccctaaaaaaaaatacaaatgatttcaagtggatgtcaacttgagcaactcggaagtggaatatttttagggttaaacaaacgtgcgcacgcaccaaccggtagggtttactctgcatcaatagtcatttggcaagaaccaatggctgagtttttgcaaatcgtccatttaaaggaatagtttttttcccttgataaaccccagagtcgcagctgtgcgcatccacaggcaagtagtttacacgtgcaaaattcattcctgagtcaggcgagccacaggctcagctgcggcgcggtgcggcgcttgcctggggctagagagtccacgacttgttgcctctgcgacccgaaagcggctctccaaaccctggccactcagaatttgagggcctctgggtctatgatgacagggctctaggagaaagcgcctctctgtagaacacccacaaaaacagagcaaagtc

SEQ ID NO: 40285 - DNA, 497 bp, Homo sapiens; identical to SEQ ID NO: 37590
  chr3:147088256-147088753
  hyper

SEQ ID NO: 40286 - DNA, 1796 bp, Homo sapiens
  chr3:147108915-147110711
  hyper
cgcaccttgcacgtgtatggcttgtcgctagtgtgcacgtgcgaatgcttcttacggtcgctgctgttggcgaagcgccgctcgcagccctcgaactcgcatctgaagggcttctcgcctggcggaggcaacgcagagacattagtgcttgtgggtcgtgttcccgtcaggtgcttgccaccctcccccattcgtctctcattttctggaaaagaactacaaaatattttcagaaatccctttccacggcgcctcaggtcgagcacccctttccctcgtgcagagagcgcccccggtgccctctcttgaacgcctccatccctcccgccttcctcctctgggctcatggggagggtatggaggaggagcgacagtgactccatcttagtcgagtttccatcctcgaaaatcctgatccactcgggttgtttcctccaaattttctccacttggaaccagaagcacctctgctcggaaatacattaacggaggagctcacaatatagttaacggggaagctcacatctgctcgatttaaagttgctgtttcagactaacttctctgccgctaccccgcccagccgttcatcccccccacccacccccatcctggcccaaattgtttcctaaagtaggttttgcgcaaacgccaaagcgatgaaataatttaaggatgcgcagccgatgcacattgtgtgtgcataaagtggattcgtgctgcagggagaggtattctgagcaatgattcacttcagaagagatttttacaggaatggagccccctccctctttccttctaccccctgagggcaaacatttagcagcattcttcaaatcttgcctaaaccttccgggatccctccagatacgctcgccagtaataatatttcattacgctgctccagaggcttcctggagaccgtgctgtgggcagctggccctcccagtccgcactgacttgcgatgtcgaccggtctgcccagaccacccccacctggctgtcgggcctctcggtcctaagacgaggggttggcgcggtagggtccgcacaggccaaatgggatccgaggtgtctaccgcaaccacgcccttgagcgctgcggcttcgggaagaaaacagctgctgctgtcaggccaggcctggctccgcagcccggagggccaccaggcggctggcataggccggggaggggctgggatcggtggctgcgatgccctgtagagccgagggaaggcgcgagtgcacgttagagtgacaatattggccggaccgagccccaatcggggagctcacggccagctgaattcgctgacgtgtaggagaggaaaggaccccgagaacccggaagcctagattcctgccggagctgcaagtgctgcggaaatgggggaagaaggtttctgggcgctttaaacaaatggctgcctcccagcgctctgagttaagggaccggctacctagcgtctagctgaggaggaagacgcgcagctggagaactgttgcctttgtagttgcttctcccgccgcatccaggaaaaacaggcgctttggggctggttagaacaaacaaagccccaattcccgagccctgttgaggctcggacagagaggtttgcgcacaacctgcgcttctgcgcaatcagcggctcctgagcccgggtctccggcaccacctggtcgctggattcccaccctacaggagcacagctagtacactgaacagtctggaaggtgttggcacctgccatttcgcgggacactggcaccattttataaaacagtgatagaaagatgc

SEQ ID NO: 40287 - DNA, 857 bp, Homo sapiens
  chr3:147110942-147111799
  hyper
cgccaaacgcttatccgatctcgtgagcgcctcactggacattcacgtaaaacaaaaacaattatttcgctccagacgaggagcagaggagaaaacagcagtgcactgagtgataccggcagccgggaagttcgcaggcccctaggaggccaggtgaggccgcgccccagcttgctccggagctgcaggaggcgccctggtctctgcgcttgacatcacccccgccccccgccaacacccggcctccagtccttccccctccctccagctccctgcactgcgccctgggtgggtgggtgaatgtgaagaggcggcgttgggctaggcccctgcagcccgctcggagcgtcctaggcccggggctgcgctgtgaaagacccagattctcatcccagaggcccagcagtcctgaaaggcctcctctccgaccctgagccgggtccgccgaacaaagttcggaagctcgggctagctgggccagcgccattttctcgcacttgtggctggatctggttgtcccggcgactgcgccccggcgcggtctcttttcctctacctcggatccccagcactgactcgccctcagacgccggggaaggtgtggtgagctcccggccccggccgaggggtccctggagaggagctgggtggcggtggccaggccgagcgcggttgctggcccgcgcctccctccccgaggcaccattgttccgggatcgctgtgaccgccacaaagtgaatcctttcggtgcggacagtcgccttcaaagccaggccccggattcaggtcagggagaatctcagctcctgagaaatttgctcctgtttgccgcttctgctactcgaggaaatgaaac

SEQ ID NO: 40288 - DNA, 632 bp, Homo sapiens
  chr3:147136878-147137510
  hyper
cgagacttccccacaacacctccaccgaaggctgggtcgtcagcgtttgagggaccctcccgccaccccgcagcctggcggggcgctttccaaatcgtcgcggcaggctctggccgggcagggcgagatgtgcgcatgcgcggcctgtggcccgaggttccacgtgctgatgaatatgcatgagactcccccgccctcgcgggctagagagagaaccaagcagaggctccggcctgtgaaagtcgctggctaggctcccaaaatagtgcggcggggtagctgcacgtgtttgttttcaaaccgcgctggtttaagtgagttcacactgcggagccgacagcagagggtagagcaacctggggctgctgccattggaacggcgagttgagcgggcctgtcagggcctctccgccgagggccgggggctgcatggtgctcgagccccagccggccacaccccagtgcatcgggtggctgggcttccagtttacaccgggcctaccagggaggccttcttctcttatcctttcccaagcccgagctgccgccccggctgttctcatatccctagcccctcggagaagacttagcctacccctagtcagagctcaggccccaggtgaccgggcagc

SEQ ID NO: 40289 - DNA, 796 bp, Homo sapiens; identical to SEQ ID NO: 25637
  chr3:147138422-147139218
  hyper

SEQ ID NO: 40290 - DNA, 106 bp, Homo sapiens; identical to SEQ ID NO: 22311
  chr3:149360184-149360290
  hypo

SEQ ID NO: 40291 - DNA, 844 bp, Homo sapiens; identical to SEQ ID NO: 33781
  chr3:153839633-153840477
  hyper

SEQ ID NO: 40292 - DNA, 771 bp, Homo sapiens
  chr3:154797121-154797892
  hyper
cggtccacaggggagagatggagccccctcaggactagagaatcccgaagagcccgtgtattgttttcttgaaagccccgaagctaagcaattctaaaaatgtttagcaaagcccttttgggaatggtgagatggggggtggggaggatgggacattttcattgccaccgcccgccccccgtctccccggccccctcacatgaagtgactggatttgggagacctagcggaaaccttcaggtcacccagggaactgctcctctctctggtcctgcagcggcgaggcggggtagggggtggggggggtgggccgtgagagcgccgagacgcgcggggcgcggagatgtgcaagtggcgaagcttgaccgagagcaggctggagcagccgcccaactcctggcgcgggatctgctgaggggtcacggtgagtctctgtgggtgcgggtcggagggatgcccaggtgcctcgtcgccccacggcccgggcggaggcgggtccggaacctcccccaagtccggcctcagcctggagcccgcgcgccttgggcggatgcacggactgagaggcgcttggctgggctctcagcccgccactgccacccggccccgtgcgctcattggtcgggatgtgtcggctcagcagcctccaacttctcccgaatcccactggtgagtcccaggagagcgagctgagggagaaaggtccaaagggcgcgagcgcccagggcgctgggagcccgtgggacgggcacggggagggcagagccagcc

SEQ ID NO: 40293 - DNA, 52 bp, Homo sapiens; identical to SEQ ID NO: 22315
  chr3:156396583-156396635
  hypo

SEQ ID NO: 40294 - DNA, 295 bp, Homo sapiens
  chr3:157260928-157261223
  hyper
cgaggcggggtgggggaggtcgtgtcccagggttctgacagtggagccaggacgtccgggagctgacaatctaaacgcgacctgggaaggggcggtagcgggagtggctgcttcctgggaggtggtgctcgcaaacctggcagctgactgggtggggcgtgccttccctggcagtcgcggaggggaaggctgagggacccggtccccgccccgcgtgctcaggctgaacagcttttcttccctgatctctcggaggcgccggctgctggccaacgcagggcagcctcctgcgtgc

SEQ ID NO: 40295 - DNA, 838 bp, Homo sapiens; identical to SEQ ID NO: 24412
  chr3:157812151-157812989
  hyper

SEQ ID NO: 40296 - DNA, 31 bp, Homo sapiens; identical to SEQ ID NO: 22317
  chr3:157828149-157828180
  hyper

SEQ ID NO: 40297 - DNA, 385 bp, Homo sapiens
  chr3:158288800-158289185
  hyper
cgaaaagctccccggccggcgcaaggccagacttctcgcctccactgtgttgattgcggttgccagggcagcggcgcattgctccccgcctcgtcctggtgacgtcacagagcaatgtccaatgggaaagcagctcggtgtcacgcacctcctatcccggcgggcaccgcctgcgccgcggcgagtgaggcgtcgtccgtactggaggctagctcttgtcgcggccgcggcgagttaacatcgtttttccaatctgtccgcggctgccgccacccaagacagagccagaatgttcaggatgctgaacagcagttttgaggatgaccccttcttctcgtgagttacgggagccaggagtccggggtcgcgcgggaattaaggtatc

SEQ ID NO: 40298 - DNA, 1895 bp, Homo sapiens; identical to SEQ ID NO: 26955
  chr3:16553609-16555504
  binary

SEQ ID NO: 40299 - DNA, 950 bp, Homo sapiens
  chr3:169482182-169483132
  binary
cggaagacgggagaacccacgcaggaacggctccaggcaaccccggctcactgcccattcattttggccgactttggaggtgccttcacgtctcctgccaatttgcagcacactggcccagtcagtcaggtttgggggttcacaagcccccattgccggcgaggggtgacggatgcgcacgatcggcgttccccccaccaacaggaaagcgaactgcatgtgtgagccgagtcctgggtgcacgtcccacagctcagggaatcgcgccgcgcgcggggactcgctccgttcctcttcctgcggcctgaaaggcctgaacctcgccctcgcccccgagagacccgcggctgacagagcccaactcttcgcggtggcagtgggtgcctccggagaagccccgggccgaccgcggcctccaggcggggttcgggggctgggcaggcgacccgccgcaggtccccgggaggggcgaacgggccagcagctgacattttttgtttgctctagaatgaacggtggaaggcggcaggccgaggcttttccgcccgctgaaagtcagcgagaaaaacagcgcgcggggagcaaaagcacggcgcctacgcccttctcagttagggttagacaaaaaatggccaccacccctcccaggcccaccctccgcaacccggtgcgctgccgggcgagtcggcttataaagggagcggccgccgaccgcacggattggccaagctgactctcgcggctctcgtgagagtcactctctcgggcgggctggttggggggaacgggaaattaaagttccatttccggccatgaggaaggacgttgcccttccgcacgtccgggaaaggctttgcgtctttacttccgaccttctttaaaggtgaaactaacttgaggtatcagagggccttttttctatcctctgcagaccagacgcggttcacctc

SEQ ID NO: 40300 - DNA, 820 bp, Homo sapiens; identical to SEQ ID NO: 24414
  chr3:169539913-169540733
  hypo

SEQ ID NO: 40301 - DNA, 1387 bp, Homo sapiens; identical to SEQ ID NO: 22897
  chr3:170625831-170627218
  binary

SEQ ID NO: 40302 - DNA, 97 bp, Homo sapiens; identical to SEQ ID NO: 9679
  chr3:179377859-179377956
  hypo

SEQ ID NO: 40303 - DNA, 561 bp, Homo sapiens; identical to SEQ ID NO: 26964
  chr3:180319831-180320392
  hyper

SEQ ID NO: 40304 - DNA, 924 bp, Homo sapiens; identical to SEQ ID NO: 22899
  chr3:180397104-180398028
  binary

SEQ ID NO: 40305 - DNA, 1474 bp, Homo sapiens
  chr3:181429601-181431075
  binary
cgccccctttcatgcaaaacccggcagcgaggctgggctcgagtggaggagccgccgcgcgctgattggtcgctagaaacccatttattccctgacagcccccgtcacatggatggttgtctattaacttgttcaaaaaagtatcaggagttgtcaaggcagagaagagagtgtttgcaaaagggggaaagtagtttgctgcctctttaagactaggactgagagaaagaagaggagagagaaagaaagggagagaagtttgagccccaggcttaagcctttccaaaaaataataataacaatcatcggcggcggcaggatcggccagaggaggagggaagcgctttttttgatcctgattccagtttgcctctctctttttttcccccaaattattcttcgcctgattttcctcgcggagccctgcgctcccgacacccccgcccgcctcccctcctcctctccccccgcccgcgggccccccaaagtcccggccgggccgagggtcggcggccgccggcgggccgggcccgcgcacagcgcccgcatgtacaacatgatggagacggagctgaagccgccgggcccgcagcaaacttcggggggcggcggcggcaactccaccgcggcggcggccggcggcaaccagaaaaacagcccggaccgcgtcaagcggcccatgaatgccttcatggtgtggtcccgcgggcagcggcgcaagatggcccaggagaaccccaagatgcacaactcggagatcagcaagcgcctgggcgccgagtggaaacttttgtcggagacggagaagcggccgttcatcgacgaggctaagcggctgcgagcgctgcacatgaaggagcacccggattataaataccggccccggcggaaaaccaagacgctcatgaagaaggataagtacacgctgcccggcgggctgctggcccccggcggcaatagcatggcgagcggggtcggggtgggcgccggcctgggcgcgggcgtgaaccagcgcatggacagttacgcgcacatgaacggctggagcaacggcagctacagcatgatgcaggaccagctgggctacccgcagcacccgggcctcaatgcgcacggcgcagcgcagatgcagcccatgcaccgctacgacgtgagcgccctgcagtacaactccatgaccagctcgcagacctacatgaacggctcgcccacctacagcatgtcctactcgcagcagggcacccctggcatggctcttggctccatgggttcggtggtcaagtccgaggccagctccagcccccctgtggttacctcttcctcccactccagggcgccctgccaggccggggacctccgggacatgatcagcatgtatctccccggcgccgaggtgccggaacccgccgcccccagcagacttcacatgtcccagcactaccagagcggcccggtgcccggcacggccattaac

SEQ ID NO: 40306 - DNA, 481 bp, Homo sapiens; identical to SEQ ID NO: 24417
  chr3:181437081-181437562
  hyper

SEQ ID NO: 40307 - DNA, 217 bp, Homo sapiens; identical to SEQ ID NO: 15940
  chr3:183217407-183217624
  hypo

SEQ ID NO: 40308 - DNA, 72 bp, Homo sapiens; identical to SEQ ID NO: 26976
  chr3:185271311-185271383
  hypo

SEQ ID NO: 40309 - DNA, 754 bp, Homo sapiens
  chr3:186078710-186079464
  binary
cgtatgctaatgaagtccgaggaggcagcggcgcagcgcgggagagcgcgcccacgggttcacagcgctcccgggcaccactgcggcgcagccacagatcgcttcgcgctgcagcagacgctcccgccgcggggggcgactgggggaggggtctcgaccgccaccctgagttccgcagctcatccctcccatctgggaggtggttctagctctagtcccaagctttccactgcagtgatggtggggatgggggcagcacgtcaaatcacctgtagggctttttagaactccacagccccctcccctaattctattccactagttcaaacgaagaaaatctcagactaggcaaggggaggtggaccggtggagtctgcgaaagcaccacaggtgactccgggtacgcactcctcaggacacaagcacacacacggacacatcttgtgactctgagactacacagatcaacctcagattcgacccttccctcctttattctctgaggtgtccgtgttcgcttcagcttccctttaagtcgccctgcgcaggggctttgtggagtgcccccaaagtcctagaaccccgcgggacggtcggaggctttggcggccagacattaggaaaagcatctcctgcttctcggactgcctggagcgcgaactggatatcaaggagccaaggttaagtccagaagaagaaggaaatccgaccagttgctttagcaaactgcctggagcaaggccgcctcccaccc

SEQ ID NO: 40310 - DNA, 334 bp, Homo sapiens; identical to SEQ ID NO: 6585
  chr3:187443068-187443402
  hypo

SEQ ID NO: 40311 - DNA, 1915 bp, Homo sapiens; identical to SEQ ID NO: 33786
  chr3:187455297-187457212
  binary

SEQ ID NO: 40312 - DNA, 933 bp, Homo sapiens
  chr3:187457230-187458163
  hyper
cgggagggtgcaggagacgacagtaaataaaagcgaatttgataacgcgatggcctcgacagccgctttggataaccgaggtgttcggggacattgtgtcctgactttcatttctatcacgtttcctgccaacagtgctcttgcaagcctgcaagcttctaggaaatgcaataaaacagagggatgtgttttatcatcaagatctgaagaggagttgcagaagggacgttccccatacgctcagcgcgagacagccttccagaagggcccgaagacaatgccagcaaatcgcgtcccggagcagagatccctcggccgtcctggctggactgggctcagcctttgcaaaaaggctggcgggggaggggagaagcatgatctcctcaagcaaacaatgcctttaaaaatccgatctggaaagaagtcagccaaggtccttattcacgttaatgaagatggaaggcactaactgtccttggaaagcgatgagtcaaacttgaccgcgcttcaaactcgttcccagattcgtttccagtccgaacagaggcgcgtttctccgacgcggcctccgacggctcccgcagtgggaggggccgaactcgatccccgccgacccgggcgggggcgacggcgctgtctccccctgcagagcgcgcctgctgccgctaggggccgccagcatgcggacgcgcgtttgccatcttaagtcacgagctcggagaaagaaaactttacggaggaactgttgtggcacaaattctggcctatccacatgacccccaccccctcacacacacacacccggtttctcgccaggctactatgcagaggatgttaggaaggggaagagagcgatttcagaatcgaggctcgccctgcaagtctttggtccaggccttaacccccctcttaacacgcaaacccccgagctcc

SEQ ID NO: 40313 - DNA, 932 bp, Homo sapiens
  chr3:19189374-19190306
  hyper
cggggccagtttcccggactaaaagaccctggtgactggggatgggcctcacaactaactcgggctgccctgcccctgtcgcgtgggctcgcaatggcaagtgctccggaagggggccgcctccccgtggggctcctggctgcctctgctcccttggacaccactggggggcctccccctcctaagttctaggttgaggccggatacctgccccgacctgtctcctccctttctccaataccacacccacgggactccagtctccccgggagtgggacggagagggaacaaaggggtctttgttcactggctcccggggcgtgggagttgcgctcgctctcctttcccggcgtcccgtggagaccgggaggctcagcgcctctcccagctctcagcgccgccctcccagaccccagagacgtcggtcagggcgcggcgccccgggccactgcgggctctttccgggcgggcgacgtggggggcgaggcaccgcgcggcggcgcctggcgggcactgttgcccgcggagggacggtgggggggtttcagcagctggcgggggtggagggggcgggagagggagcctgcgccgggctgagcctggaggtgcggggcgggctcggggagcgctcttggggctcctcctgccacagccggggcggctggaactctctccctttctccctccatccttccacttcccctgctcggccccgccgtcaggccgggtcccccttccctgccgtcatcaggttccccttctcccttcttggcactttcctttcgaaccatccttctggacaaactttgatggagaatttcacaccacgctggaaaaatgccggttatgaaaggattactggcgccgcaaaacaccttcctggacaccatcgccacccgttttgacggaacacgtaagtcttacacttgaac

SEQ ID NO: 40314 - DNA, 346 bp, Homo sapiens; identical to SEQ ID NO: 22341
  chr3:193455077-193455423
  hypo

SEQ ID NO: 40315 - DNA, 482 bp, Homo sapiens; identical to SEQ ID NO: 25652
  chr3:193775965-193776447
  hyper

SEQ ID NO: 40316 - DNA, 74 bp, Homo sapiens; identical to SEQ ID NO: 22343
  chr3:193903180-193903254
  hypo

SEQ ID NO: 40317 - DNA, 296 bp, Homo sapiens; identical to SEQ ID NO: 20559
  chr3:193969977-193970273
  hypo

SEQ ID NO: 40318 - DNA, 485 bp, Homo sapiens; identical to SEQ ID NO: 22904
  chr3:194208086-194208571
  binary

SEQ ID NO: 40319 - DNA, 295 bp, Homo sapiens; identical to SEQ ID NO: 25655
  chr3:196069909-196070204
  hypo

SEQ ID NO: 40320 - DNA, 753 bp, Homo sapiens
  chr3:196386796-196387549
  hypo
cgcatcagccgcggcgccttccaggagcaaggtcacctgcgcagcctggtcctgggggacaactgcctctcagagaactacgaagagacggcagccgccctccacgccctgccgggcctgcggaggctggacttgtcaggaaacgccctgacggaggacatggcagccctcatgctccagaacctctcctcgctgcggtccgtgtccctggcggggaacaccatcatgcggctggacgactccgtcttcgagggcctggagcgtctccgggagctggatctgcagaggaactacatcttcgagatcgagggcggcgctttcgacggcctggctgagctgaggcacctcaacctggccttcaacaacctcccctgcatcgtggacttcgggctcacgcggctgcgggtcctcaacgtcagctacaacgtcctggagtggttcctcgcgaccgggggagaggctgccttcgagctggagacgctggacctgtctcacaaccagctgctgttcttcccgctgctgccccagtacagcaagttgcggaccctcctgctgcgcgacaacaacatgggcttctaccgggacctgtacaacacctcgtcgccgagggagatggtggcccagttcctcctcgtggacggcaacgtgaccaacatcaccaccgtcagcctctgggaagaattctcctccagcgacctcgcagatctccgcttcctggacatgagccagaaccagttccagtacctgccagac

SEQ ID NO: 40321 - DNA, 835 bp, Homo sapiens
  chr3:2139600-2140435
  hyper
cggttaccccgaggtgtggagttgcggcgaagggagccacttctgcaaggaaacagtagattcataatgtagaatgaccgtggcaacgtcgttcaaagcacattctttcgaataacaaggctttcgacatgccccacccccgcgcacaacacaccacaaattgatccttgtacctaatttacagcaactgttccctctgacctccccccgcccccgccccacattccaacctgaaagcactttgcgtggatgagacttcaggtgtgtaacgcagcctgtccagccagtgtcctccgcctaaggacaggcaggtaaaaacctaccaaagccccctcttctggcctaagttcaatgccacccgcccacccacattccccggttcagcaattttcagcccagacgcagaagcatctgtttccctggccagggcgccttaacgatcccccgaattccgcgtctcccggaggccagaggtttgggtacccaggaaggtcgcgcctcctcgtgccccgatactcgggttgtaaagggaggagacatcgcctcggcgcatccctggccgctgaacaacgcaacccctacgtccccgcacgggaatccggctgataatctcctcttgcctgagaatcgggccaggcgccctttactaatttcgcgcgctggggacctggggctgccgcctctcggccgcgcggggcaggtgctgcgtccccagcgctcgcctcctccggccgcgcactgagcatgcgcgggctccgggcctccggcgcgtctccccgtccccgctcgtctcccgcccgttcccacccgcccgcgcctctccccttccccgagc

SEQ ID NO: 40322 - DNA, 1340 bp, Homo sapiens
  chr3:2140443-2141783
  hyper
cgccccgcggctaaggagccggcagcccgaactccggcgcgccaggtttttccagccgccgcgagcgccgggagggagggcagcgccgcgccagacggagcccggggttcgacgccaggattggctgcaagtagggagctttcgccgccgccccgggcccctcggactgtgccggcgccgcacccgaggctctcgccagcccggcgccccggtgctgaggtaagtgaggcggcagctgtgcgggtccggctcctgcgtgggcgcgcgatgccccggggacgcggtcgcgggtgtgggggggaaagggcagggtccgcgcgggttgcccgaaggacaggggcgcttcccggggctctgactcccgcggggccgggcagcgtctgcggggccgtccagctcagagcccggaagccctgcagggtcggggagcgggagctgaacgcctgagcgcggaggactcagggccccgacgacgccaccgtcaccccacagcgacccttcttctccttctcagccggaaaataagtttgttgcgctgcgaggcagccacaaaacaaggaaccgagagcccggaatgctgcgggaagccttcaagtcagctcctccgactggttcgggctactgccccctctccgtgcgccctggcctctggcgccgggttcccggcggggcttttcttctgacagcccagtcacagcccgcagcagagggacgcgaacctggggagtggagggacctgggactaaaggaacaggagcccgtagccgtggtggaaggagccgcgtggagacggaggctgatgtctgtggcgcccgctgggtgccgggctggctgctgagcgctgaggctgcggcggcgagcgacaggccaggtgcctgctcttagggaaggtacctggcttccccagtctctgccgcgggagcctgttgggtggcattcgtttccagcaacttctggggggtttccagtttctttcgagaggcaagacaaccgccccgtcccctccccgggcccagacggcggcgaactgtgcgccgggcgccccacagaccccaatccactcactctccttctggaacgcggggctcaaaatcttcgtgcattttctctcttgtgcttcgtgtatatgttttactatttatgaagggtgtggaggtgagggtaggaggacgtgggctcctgaatccctctgaaccagccagagagtcggctgcatggaaacatttcgcagcgaagctcctgcgaggaggcggcttcgcgcgtcgggaagatcaggcggttgcttgctggccagggtctgcagattcggtgcgaagaagctggcggaggttgtgtagggc

SEQ ID NO: 40323 - DNA, 1271 bp, Homo sapiens
  chr3:238187-239458
  hyper
cgacctgtgtgtgcaacatgaaccgagtgaaaccatcggggagggggtggggggcgtttcttttaaatgtcgcttttgcagataaacgagcagggatcctacctcttttgaccggagatgttgaaaagcacgaccaaagtttttggcttggtctcttgctttccacaacgagataaagtctgaagcctgtaactctccctgtcccgcgggagcgtgcaaagggagggaagataagcggcgtgggtgaggggtggcggcgcagaacccaggaagggagcagaggcgagagccagcctccggcaggagggcgtagaccccggtgccagccagaacggctccagccttcccgcggccagagagccagcggcgggaggggacgggcgggacctccgcggacagccccgggtgcggaccagcgggcagcggccggcgagaccctccctggatccgcccagagcttaccggaccctgcgcgcccccgtcccggctcccggccggctcgggggagaaggcgcccgaggggaggcgccggacagatcgcgtttcggaggcggcgcaggtgtgtcaggggtgggggtccgctggcatctctcgtgccggcgctgggggggtctcccgtggaggaagggctgaaggtgctccgggaggggtccactcgttatggaaaggaagcggggcgcggtcagggtccctcgtccgcagtgggggtggtccgggcccctcagcctgcacccgggaggagacgcccccttttcacgccccgcccccggtggccgaggccggattcggacagctcggggtcagtcgacggagcacaccgggcgcccgaatccgccgggtcccactcacgcccgccggccgccggtaggttggccctcccgcttccagcctccgccaccccatccctcgctgctctctgaggaggattccagacccccccgtagatctccgccctctctcgggtggggctccgaggtctagctggtctgggggtcagtcccggcctctgtctcccaccgcgcccctcgctcccctggacaccgcctggtgtgtggggctcagacccccccagtccactgcccctgtgtggctcctcctctcaggagaggattctagatcccagcccggggggggttccgaaaatgccgccagcctggagcggggaatccatggaccgtggggttgtggggttggggagcacgaaaacccagagaggggctagagctccacctccccagaccgccgaggggcgagagggcgcgccgggggcc

SEQ ID NO: 40324 - DNA, 767 bp, Homo sapiens
  chr3:239481-240248
  hyper
cggagcccggggggctggagatgccggtcgcggatggtcccttcttcctctttgtgcctctctctttctctcgctttttttttttttttggagtgtgagtgtgcgtggggaggcagcacggagaaagtgattaatttggggagcagggattggagccgggaggctggggaaagccagcccctccgttcccactctccgggctcgctgcgagccacagtgtctcagccaggggcagggccggggaactcctgcgaaaaaccacgggccggaggagcagcagccgcgcgggcccaggtacccccgccccagacggccagcagggtggagcgcagggtgggcgtttgggctgctgggcgggaaggcgggcggggaaggggtgggaggccggcggcggagggcaggtgtgcgtcggcagggctgggtggcccggcagagagggcgccccaggttcagcccctcctcgaagggcgccggcgtccagtcccgctcgtgggagccgcggagcagccccagggccggcgagcggctgccctgccaggcgcgtgcgcgagggcgcgctcccgcgggaacgcgccgtgcgcggggagatttgcgcgtgcgcgtggcgatggtaactggtgggccccccgggctcgctctaggcggaggctcccgggacgcccacgtggcttcgaattccagctccaccatcactgtgatgcgtcactctggactaggcatttaactacgtgcctcagtttccctttctcaataatacggagattatc

SEQ ID NO: 40325 - DNA, 829 bp, Homo sapiens
  chr3:27754023-27754852
  hyper
cggcggcggtcagagatccatgtgacgcgggggcactttagggaccattgctgagggcctggttagcatttgggcagctgaatccttcccttggcgaactccatacgtgccctcggcgacacacagaggactcccagagttgaagaagggggtggatgtgtgtgtgcgcactcgcccacgtctcgtgttttacttttcatttaagtcgtaataaggagaaattcgatgaccagcaaggctggagtcccatcgtcttgttgggggagaggggggagaagaaaaaggtgcctgtaacttcagactgtccaagatatcgcttagctcctgcgcccggaagaaaatccagcgcaggtcgggttccggcgcgcggaagccctgcgaaccccaaatgtgtgcgctgagccgaggcctctaagcggtaggagagaatctgacctccgacattcttttcaagacacgcgccggtggaccgggtcctgggattggcttactcccgggctggaccttggggttcgcatatttgaaagcgtaaacttgaggaatgacggcggggtgatgggtattttatagagtgggactcaatcgtgctcagcaacagatttctccaaattcccttttaaaaagagcctcccagagctgtcgaaatctccgcggggtgaaagctaaacttttggagtcgctgtgtagccgggtagaggacacggcggcgcgagccggaaagataagtgtccaggcgaatgggaaaggaaagatcttaatttttgttcctactgttagctgaatgtccataaaaatcaaagggaatgcggggaagtttttattccagagc

SEQ ID NO: 40326 - DNA, 983 bp, Homo sapiens; identical to SEQ ID NO: 23246
  chr3:35680722-35681705
  hyper

SEQ ID NO: 40327 - DNA, 1420 bp, Homo sapiens; identical to SEQ ID NO: 22349
  chr3:37033979-37035399
  binary

SEQ ID NO: 40328 - DNA, 119 bp, Homo sapiens; identical to SEQ ID NO: 22350
  chr3:37438337-37438456
  hypo

SEQ ID NO: 40329 - DNA, 419 bp, Homo sapiens; identical to SEQ ID NO: 24436
  chr3:38035641-38036060
  hyper

SEQ ID NO: 40330 - DNA, 1452 bp, Homo sapiens; identical to SEQ ID NO: 39208
  chr3:3840349-3841801
  binary

SEQ ID NO: 40331 - DNA, 664 bp, Homo sapiens
  chr3:42947384-42948048
  hyper
cgctacctcctatcagcaaatatctgtccacctagggtgcagcgagctggagaggaaggggtggcctagagcgcaggggaaggattcctccccagccgcctgcacccctaccccggtagcggtccctgggatcgtccgtgtctccaggagaaccggaccgctctcccctccctccccgagcgagaaaggaggaccacagagatgcggcgccctccgccgtcctagagcaaccggagcggcccgagccccggcctcccggatgctggggcctggcgggtgtggagcacggggagtcgggcgtggggcgggcagggagtggagtcggggtcttactccggtggctgcagggcgcagggtagccgtgtcaggcctgcccaggtgcagagcgctcttccgcgaccccaacagcctctggtccggtctggcgcgccctcgctttcccagagggcgacctgggctatggcggccgtggcgctggcgagcgggacacgcctcggccttgtcctcgagctgctcccgggacagcccgcgctgccccgggcgcgccgggtgagtgcggggccggagcctggaagcagtcttggccctgccctgggttctaggcccggagacggggtggtgcggcggctgggaaatgggggtacaacccagagtgaggggcctc

SEQ ID NO: 40332 - DNA, 1462 bp, Homo sapiens
  chr3:44039193-44040655
  hyper
cgctatctagcgtttatgcccgaagctttacgaataaactccctttccaggtaaacctgcccaacccttgtcctatgcccagcgaagcccaggtacgatgggtcaaggacccctggcttccacattgtctgagtcacgttccagttggaaaggccatcttgggcgagggacgtgttgcccgactggtctaaataaggaaagaaagtggagtaccaaagaatcaagggcctctgttcctccccatcccgccaccaccaccaccggtccccgggctctgctgagcgctgcggcggtcttggctgaaaactgcgtccccgcccaaatcgagcgcaaaactcccttggacagaagtttgaaagaatccagtgtagaaacagacttctccgtccaatttggttttaatcagtaatcatataagtatacccacataaccacctaagtggagagcagacgcccagattcacggtccccacgtgttgctggagttggcgcagacgcgtgtgcgggcatagcggcggacgtgacaccgcattttctccgaattcctgccatctagggtggtgccgccccaagagggggccgtggggaggtggggtaataggctgcgcaatccacttgctctgggggagcttagggttcagagcagagcgcaactccggggggctgtcgcacagccccattctcccacaccagaagagcaatgctccttatggatgattaatagccgggcttctcctgaccatgcggcgcgtccctgccggcaccacttagttgttttaatttgacctttattagcaacgtgctcccagaggctgcgagttggattcgcaccacgataacggccctctccccttccacccggccggcttcctgggaaggatcggggactgcagctcccgcgacgcctcctcctcctgcgcagggagcaggcctgagttcctccacgtaatgacctgggagacctcaggcatcccggggcctggtcggagggtcttcgggccctggagctgggcggtgtctgcagtgcaccgccgtgagtttctctcgggtacaatgtgctggtgtgcagagaggaggaaaggaaaaaaaaaaaacccaacaccactcttaagtggcactggcatctatgaagtggcagtggtctacactgagcgtgcccttgcctggaggtgtagggggcggttactgcagccgaggggagggtactgcggccaagggcagggcgagaggacagtcaaggccggctggccgcgtgggagcctttcctctccgggttcagcggccggaatcaccagcactgcggctaaaggggctggtaggctctcctgcaccccgcgtgctcctccgccttctctgtgtcccccggcttttccaggaggaagatggggtgcccatcgcgaatggggcgcgccgggccgcctggccgggcggtcacgtgtcccccctcccccgccactgcggc

SEQ ID NO: 40333 - DNA, 623 bp, Homo sapiens; identical to SEQ ID NO: 39213
  chr3:44596479-44597102
  hyper

SEQ ID NO: 40334 - DNA, 550 bp, Homo sapiens; identical to SEQ ID NO: 22355
  chr3:44666348-44666898
  hyper

SEQ ID NO: 40335 - DNA, 376 bp, Homo sapiens
  chr3:44726860-44727236
  hyper
cgcaaaactgcccttcaagcagttgacgagcgactttccccttacatcaagtgcacagtaagcccaagcgccggggccgcggggattcccgccagtcactcccgccactaccgccacccggccccgccgccagcgcagcccgcagccccggcaagcctgcgcccgctcggccccggtctctttcgctcaccagaggctacggggcgcccggccccgcacacccaagaaacactgccaccgcgacgcgcctgcccccaggatcctctcgcgagcttcagtacccaaggaagatgggccgtcccggaagtgcggccggggcgacttgcaggcccctcgccgaccgctctaggaatctcggaggtcttttgacctcgac

SEQ ID NO: 40336 - DNA, 314 bp, Homo sapiens
  chr3:44770936-44771250
  hyper
cgcacgccaggtggggtcgcaggttgtttctggtgccggcttaaccggcgcagcaccgaaacccgtagctgcgtgcgggaaggaaccaccgagcggaagccgctcccaccttcctagagaggagacggtagtggttattagccgaggcgcggactgctgacgtcacgccggctgggcgcgtccgggacttactcctttccgcagggcagcacccagggacctgagtgttgcaaggtgcgagaggggagcgccgcggggagcgccgcgggaagcgcatggtgagcggtttctgctgtgcccggctgccgcgggtc

SEQ ID NO: 40337 - DNA, 122 bp, Homo sapiens; identical to SEQ ID NO: 22357
  chr3:48703720-48703842
  hypo

SEQ ID NO: 40338 - DNA, 187 bp, Homo sapiens; identical to SEQ ID NO: 31849
  chr3:49851252-49851439
  hyper

SEQ ID NO: 40339 - DNA, 277 bp, Homo sapiens; identical to SEQ ID NO: 24441
  chr3:50377892-50378169
  hyper

SEQ ID NO: 40340 - DNA, 917 bp, Homo sapiens; identical to SEQ ID NO: 31853
  chr3:52899918-52900835
  hypo

SEQ ID NO: 40341 - DNA, 1220 bp, Homo sapiens; identical to SEQ ID NO: 24443
  chr3:53032401-53033621
  hypo

SEQ ID NO: 40342 - DNA, 2105 bp, Homo sapiens
  chr3:62859445-62861550
  hyper
cgagccagaaggtggcggcgaagtcaccttgggaagaggagaatagggtcaaagacaggacggcggaggggctgacccggacggaaggaccagagggcgtgcccctgctctggggtcagtgaggaagggtcagggggactggtgagaactccagccataaggaagcagtgcccgaggacactttggcgacgctagtcggtgatcagctgacccgggcagggagaggagggtgcccttcgcagagtcacgggaagcttcgccttctgggcttgctttctcccgcctgcccctgcggttgctctctgccccagcgagcggagcgctgctccaagacgctcttctccctccacctcggcgcccccacctgccgttgcccccgcccgccgaacgcacgcccaggagggcgggcccggagttgagcgcagccgcccgccgctggagagcgctgggagccctgcaagcgagcaaggcctctctgggcgccgcgggcagcaaatcactccccgagcctctcggtccacaaagcgggacctgcctgcctcgctcaccaacgctcccgggctgggggggctcgagcaagcggcgctgcgctccgcggccctcgccggtcccagtcagctccaggagcgctccaggctgggttgggctgggcctgggcgagcccggccgctgggagggggcctcgtagccctttccccagggcgcggtctccacctctcctgctcctcctcgccagctgcgccgccagctcccattgttcaccccgcccgcctggcgacgtccgggtgctgctccctgggcctcccaggcgcacctaccttctgctgccggcgagccatgtcggtgggctgcttggcattaaaggggtaggcgatgcagcgcatcacgaacacatacagctgcagcctcttcttcctctcctcctcctctttctgcagccgctccaactcttccttctccttctcgctcaccaccgacgggctggggctggagggccggccgccgccagcgcggctgctgggttgcagccccccggccccgccgccgctgctcgcgccgctgcccccgccgccgcctgcacccaccccggctccggcgccggcgccgccgccccccagcccggcgctgccggccgagccctcgctggtacggctgggagacaggcgcgcgccggacggggccgagccgagcacctccttgccgctctcctcctccacgatctcatccgattcttcttcgctggacgaagggtccagcatagtggcgcctggggagcggggtctctggagcccccggcttggagtgcaaaaggtggggggcgctggaggcagccggggatcagctctcccgggtgggcgcttctccccaggtcagggagcgagagcgctgctgctcagcctcggccgccgcgactgatcctctgcccggcggtcgcgagctgggctcagacccagaagcgcgaagggaggaggggaagggagaggtgcgtccgtggactcgaggtgggcaagggggagaatcaattgcgagccccgagcccgcagccggatgccatctgcggctgctgaaggaggcgcctccagaaaagatgccgagtgttgcaagctgtcgatgcagccaagagccgaagaggcatcttgccgattggggagggagcggcgcttacgtgtttattggcttaactctcccgtgtccgcggcgtaaagggctgctgcagagggctggaggggggagagcgcggagcgtcctcagagcctcagtacttctgaccccaataccttgccaccctcctcccctgccggcttcgtggataatttttttgttgatatctggctctcattgcctcaaccccttttcccctcccgcggacaaaaagttcttgggggagggagaaatccagaaaccagccgagcgggctgtttggagacgctaaatcgagaggtcttacttaggaggaggaagtccgtgagatcttatacgggaaagaaagggtccatctcctttccccaggcttctttacacctggggcgtggggggcgtgggggctgggcagcgtgtttgtcccacctgtgtaaactctgattccagcaacttattccgcatgc

SEQ ID NO: 40343 - DNA, 928 bp, Homo sapiens
  chr3:6902336-6903264
  binary
cgcgcccctccctcactggtttctctgcccctgcctcgctttctcccagagctaagagcctaggctccggacctagggtttgggagcagtcagcacgacgtcctcgccccatcccgcggctgatgacacccgtgcccagaacgtgggtgtgggtagggaggcttccacagtgagttagggtcgagagctaggctctcgcttgctccccgcaatccctagattccctggggaccacgaaactcccattccgaggaaacctccccccattccccagccgcccacccgtttcccccccttacctcagcacgcagcccctccctgcgtgatgatgcaaaccagtggggagggctggcgctgggaagggtggggagagaaggagagccagcgagggagggagggagtgggaggaggaggagagggagccgaacgaccatttaaagcgatagcagtccctgccctctccccagtgctgggctgttggagagagcgagcagcaagccggtgagcgcgagcgcggcgcgccggccggctaacccgagagcgcgaggcgccccaggctggcaggcgccgcgggacccctcaccctctctggtcgcccctccccggattcccccaccctccgtgcctgcaggagcccctgggctttcccggaggagctcgccctgaagggcccggacctcggcgagcccaccaccgttccctccagcgccgccgccgccaccgcagcagccggagcagcatggtccagctgaggaagctgctccgcgtcctgactttgatgaagttcccctgctgcgtgctggaggtgctcctgtgcgcgctggcggcggcggcgcgcggccaggagatgtacgccccgcactcaatccggatcgagggggacgtcaccctcggggggctgttccccgtgcacgccaagggtcccagc

SEQ ID NO: 40344 - DNA, 213 bp, Homo sapiens
  chr3:69937621-69937834
  hypo
cggtgccttaattagccacatgttctttttacctcctgggaaataagtacgggataaaattggggatcaagccgtagacgtacattgacttagcacacgccgctaagtaattcatcaaggaatgttggtaattagtcctgcctctttcaactcttggcttattttataaaaccggttgatttaaaataatgcctgctgatttattacccacac

SEQ ID NO: 40345 - DNA, 45 bp, Homo sapiens; identical to SEQ ID NO: 22370
  chr3:72420279-72420324
  hypo

SEQ ID NO: 40346 - DNA, 899 bp, Homo sapiens
  chr3:87841412-87842311
  hyper
cgttttgctttctttatctgacctctctcattgctagccacccagctggataaaaagagtcactgggaagaagacgcaaagatgaaaaaatgtgaggcaaaaatcattttattttaaaggttttcggaaaagtgattcacgtcatttttcggattccatgaacagataatctcgaaggtatcactcaagtttaagagactggacttttttctcccccgcccttctccacgcatcagtgaaagaggagggaggagacggaggagagaagaggcagggaggcgaaaaagtgacagaagcaagagagaaagggagagaggggtgttgaaggaaggaagggaggaaggcaagaggagagggctgctaggcgtgctggagagcctggggcgtccgcccacccgcaggcgccccggacccgcaagggcggcgcaagacttccccagcgcgcagtcagcgtcgcggccccgaaagctggcgacaggcgctgctgtcttcccgccccgtggggtcgcccctgccctcccgcgccccggggctgggggcgccaccttgccagctccgactgctgcagggagcgccaggggtgagtgtgcggatcagcgctgagcccgggagtgcgggtcacgcccgcagctggcgcgcaggtggggaaggggtgtggggacgtggggagtgggaggctggacagcgcttgctctcggcggaaacgctgggaagccggcgccaagtcctttcccacactactttgatctaacagcgcaggaattcaagaattgccctttcccttttctgcccacaacctctgctccctgggggcgaagttctgtggtgctaggcggagatagtggtcaaggctgggaggaagggaggggtctgacccgggcccaagggcgaggggtggc

SEQ ID NO: 40347 - DNA, 478 bp, Homo sapiens; identical to SEQ ID NO: 25670
  chr3:9904234-9904712
  hyper

SEQ ID NO: 40348 - DNA, 113 bp, Homo sapiens; identical to SEQ ID NO: 7378
  chr4:100555198-100555311
  hypo

SEQ ID NO: 40349 - DNA, 1017 bp, Homo sapiens; identical to SEQ ID NO: 15961
  chr4:100573606-100574623
  hypo

SEQ ID NO: 40350 - DNA, 733 bp, Homo sapiens; identical to SEQ ID NO: 24451
  chr4:10462790-10463523
  hyper

SEQ ID NO: 40351 - DNA, 550 bp, Homo sapiens; identical to SEQ ID NO: 28031
  chr4:1299071-1299621
  hypo

SEQ ID NO: 40352 - DNA, 268 bp, Homo sapiens; identical to SEQ ID NO: 33814
  chr4:1336770-1337038
  hypo

SEQ ID NO: 40353 - DNA, 981 bp, Homo sapiens
  chr4:1396908-1397889
  hyper
cgggctgaggccgccgggcagccccgtgccaggcccggcccccggtcccggtccgcccccgccgccggtcggagcgctggtgtcggcgcccgggttctgcttcttccacttggttcggcggttctggaaccagatcttcacctgcgtctcggtgaggctgagcgacagcgccaggttgaggcgctcgcacaccgacaggtagcgcgtggccttgaacttgttctccagcgccacgagctgctcgtaggtgaaggcggtgcgcgctcgccgcggcttcccggacttggagtcggaccccgtgcgcttccgcttgggcttcgccgccgtcgccgtgccctgcggggtggtccccgcgccccccggcgccgctgcacctcccggtgggccctgggcaacgggcgagttctcgcggggtccgggggccgctgcctcgtcgacggtggctccgggggacgcgtcggtctcagccgcgccctggcaacccgacccgcgggccccgaggccgccgccgcctccccgcgcctcctccgcgcctcgcgccgcctccgtctcgggcgcttcgtcctcgtcgtcgtcctcgtcgtcgggaacctcgtccccgctgtccgcgctcgggctgtggccgccgccgccgctgctgtagccgttggtgtcgttggtctcggcctcccctgccttgaaggggtcgccggcgtctgcgggagggagggacaaggacagggcagggcagttaggaccggccggttcccagatcccgccctccgcgcgccccgcttcctcccccagggttccctcccgccccctgctcagcgcctcctgcttcgtcacccgcctcctctctctctccttcgctctgtcgtttccctcccctcggcctgtccttccctcccgccgcccgcgtctcctctcggtcccttgcttgtttctttctatggagagggtccccctcgccccgcgctgcccgttctcgcggcgccgggc

SEQ ID NO: 40354 - DNA, 1959 bp, Homo sapiens
  chr4:147559188-147561147
  binary
cggggagggggaggagtcgcatgcgcacagacgacccgagcctgctccgcggctgtccaatccgctgagagctgcgagaaatcgagtgagagaaagccctgcagcccctccgaccccatgtctctttggcaccaggcacccgccgggccgtggggggctcgtagccgaacgccgacctccgctcgtattgggctgggagttcagagccgcgcgcagaacccgggttggccgcaacgtctgtgttctcagcggtggccgggaacctgggatcagggtcacctgagctgacggggtgggggcgggccgagtggggttggaagcctggaacttagtggtaagcaggaggcgtaggaggtggcagccaggtaagaggcactcttacctacccaacgctggcttgggccgcaactttatttgggagtttctttttccggtgagacagagacccggcagaagaagcgggaggggctggaggctggtccttaggtaggcactgcccggcgactggagcgcggacctggccatttgggtggggttgagtgggggcgcgattgtgagtagcagccgcgggacgctgcgaaggggcggcggcaacagagcacgggcgggggcagaaaagaggcggcggagggcgcggtgggggagcgcgaggcgagtgctgagagagcagaaaggactcaagcctgaggggagtagagaggaagaaggggcaacgcgagaaaccgaacaggagccggcgtttcctggcaagggagggcggaggcgcgcgggagagagggagagagggagggcggggggcgcgggggtaggcgcggggagaggggagtataactcgccggccgcgaggagcgggggcagtttcgggtgccgaggtctgcagctagcggcaagcggagtcaggcatccgttcagactgacagcagaggcggcgaaggagcgcgtagccgagatcaggcgtacagagtccggaggcggcggcgggtgagctcaacttcgcacagcccttcccagctccagccccggctggcccggcacttctcggagggtcccggcagccgggaccagtgagtgcctctacggaccagcgccccggcgggcgggaagatgatgatgatgtccctgaacagcaagcaggcgtttagcatgccgcacggcggcagcctgcacgtggagcccaagtactcggcactgcacagcacctcgccgggctcctcggctcccatcgcgccctcggccagctcccccagcagctcgagcaacgctggtggtggcggcggcggcggcggcggcggcggcggcggcggaggccgaagcagcagctccagcagcagtggcagcagcggcggcgggggctcggaggctatgcggagagcctgtcttccaaccccaccggtgcgtatttctgcataatcaccgcttaaaggcacattttgacagccccctttatctgcttgatgtttttttcatgtctgcacagcaaatcaccccacacctccaaccaattttcccctctctctctcttaagtattcagcaggtcttgcctttcatattaatttttatgacctgggatgttgcctgtgcgcgtgttgtgttgtgtttcgttgtgtctacaggctcactttcctcctcctcctgcactctcggcttctttctgtggcttccctctttttctcttcacctctgttttcaggattattattattattattttaacgatctgggaatgttgtaggcgcggcgacggtgtcgagccctgggccggggcttccggagagagggcgtacaattccctgctgagcgtaatgtgtgccttctacttacaattgcagagcaatatattcggcgggctggatgagagtctgctggcccgcgccgaggctctggcagccgtggacatcgtctcccagagcaagagccaccaccaccatccaccccaccacagccccttcaaaccggac

SEQ ID NO: 40355 - DNA, 692 bp, Homo sapiens; identical to SEQ ID NO: 28034
  chr4:154143770-154144462
  hyper

SEQ ID NO: 40356 - DNA, 276 bp, Homo sapiens; identical to SEQ ID NO: 15969
  chr4:1541591-1541867
  hypo

SEQ ID NO: 40357 - DNA, 806 bp, Homo sapiens
  chr4:156129168-156129974
  hyper
cgctttaccttctcgtttggagcacagggaccgcccagctagaggagcaccagcgcactgcgccccagccctgggcgagggtgcggaggatttgttctcggtgcaatcctgctggcgcttttccggggttctgcgcggatccagctccccatctctgctcctacacacacaaaagaaaacaactctcgattggaagttgtggaattttctcagcccctacgaggcgcggggattctccagccccggccctcctcccgccagcctgaggtctccttcgctcgcctgccttgctagggaccgcagtccctcagccgcagctgggtctgtccgccccgcctttgccctcgccttttcccggggcggatttggtgaagtcggcctcaagtccaggaggtctgtcttcgccgggccagctctcgcggaactggggggtagagagcaaagggagagattcgtggaagggaagggaggtaggggtggcgcaaacgcccagagtatcaaacttgggggtggcacagtaggtgacagcagcagctgcaggtggtggctggggacccgcgagggggcgcccctctgggtagggtctggctgagcgggcttgcaagcccgggaggcggctgagagaccctggacactgttcctgctccctcgccaccaaaacttctcctccagtcccctcccctgcaggaccatcgcccgcagcctctgcacctgttttcttgtgtttaagggtggggtttgcccccctccccacgctcccatctctgatcctcccaccttcacccgcccaccccgcgagtgagtgc

SEQ ID NO: 40358 - DNA, 842 bp, Homo sapiens
  chr4:156680543-156681385
  hyper
cgggaaggggaggtgcggcggaggcgtggggtcttcccggctctggccggccccaccagtgtgggaggctgagcgccagcggaagggaaggctccgggttcgcgtccccgcgctgcccccgatgcccagcctctcccggagcggtgacaggtgaggagggtgggaagatagcgtgggggtggggcggatggtgacggggagaatccaccagggattggggggttgcgcccccacgatccgactcctttagtgcatagtacccctaagggagaggagtcaggggcggggtgaaaggttaagccagcgccatgggagcagaggcagcagcctcgcccccaagccgcttctcaggtacagcgggtccctgacgctcaagtctctccctgtccccgcagtacggatttgtgaatcacgccctggagttgctggtgatccgcaattacggccccgaggtgtgggaagacatcaagtaagtggccggctaccctggctgtggcccaggtcggcgcccagtgtgggaggccccccgcgcctcgcctggtcctcagcctgctggccgggtcgcgggcgcgcatccttggaggtgcctccgcgcctcgctcccggctcgctgcagctgcgctcccacgctccgggactggaaccaggaggggaggggcggctggggcggggctgcgagggcgagaaccgcggaaaggagcccctaggggtcaccacggcttcccgacccggcctgagcgtgggaacgcgctgccggcgctcccaggctcagcaggccgggcagctcccacgcgtgcagagccccgagggaccacacgggcctccgcgaggttcctgcgccc

SEQ ID NO: 40359 - DNA, 898 bp, Homo sapiens
  chr4:1577712-1578610
  hypo
cggctgtgggctgcagcctccctcctggccatcccagcagcatctgcagctgggcctatgcggtgagtccaccttaagtgggtttgatcggcccgtgcactggtgagagcatgctaatattggctccaataaagagcaaatcagggccctagtcgacgcgtcttatcacacagtcagaactgatggctgcagaagtcataaagatcccatttaatctcgcgcctatctatcacgcggctgccttcatcctctttgtgccggggtaatatgtgctcattacaaaagcaaaacagatctggcatgaataaacgcaggatgaagtgctcactcggaaagtgacagcatgatcagtggcggcagtaatcgcagagaatcgcgggctaaattattccataaccgtgatttgaggggacagcccagagcaccccacagctgcctgcagcacagcgacgtgtcctgataaaacatccttcccaatttacggggccgcgcttgactaatctgcctccgcgcgcacactgtctaatcatgccatcagcaccgcgagaaggggctcaattgggactccaatgaaaggagattggaaaactaccctcaattgaaattacatttgtaaatgaggcagagttttctgttcagagtgtgaacgttacggtaaatctgctccagaaagtcgaagaggcggcagcggtgggcaggccggggacgccgcaggggcgactgggactgtgccccggctggggccagggtccacattctggagaggtgcccggcaccatgctggcccctggggacagccccaggagaggagaggggctgtggcggaagcccggagagttgggcctagtttgtcagacatcagacttcacttcccactctgtaaaatggggcgcagggc

SEQ ID NO: 40360 - DNA, 767 bp, Homo sapiens; identical to SEQ ID NO: 34854
  chr4:165304258-165305025
  hyper

SEQ ID NO: 40361 - DNA, 1587 bp, Homo sapiens
  chr4:169752829-169754416
  hyper
cgctgccctggagtcgcgtttattggacactctttagtctgtaaaggaaaaaaacacaaacaccggaggagaatcatcctaacaagccgacaacatatctatgggcctaaaaaacttaaattctttcccgttattagcacttctcgatcgttccaggaaagcccgatttgtagcttggctgccccaggaaggggcctgcgaccagaaagatgcaaagggcgggacaaggttacgagtgggtgcggggaagcctccctaacctgggggccgcgtcccagagctgcgagccacgcctcctctctcccgcccgccgcgccgccggactcttattttgaagggcggcgggtgaaggctcggagcctcctgagtcacccggcgggcgaggtataaagcccgatacctgccccgcgcccggtccgcggagcccgctgcagctcccgctcgctccggacgcggaatcgggcagcagcgggaggcggcccggagagccgaggtaggcgcggggaatcggccctgaggctggtggaagaaatgtgtgaattaaagggagtgcagcgtgcagggtgggccgcgagtcgggagtgcagggctcgggacagggtgggggcggggaggacaagagactcgtcagcgcactttccacccggccggttccttcccgagccctctccctcccccggcccgcgggagcacagatccctgaaagcggagctccagataggaatgtctgcatcatcttggcagggcccagacgggagaagatgctctgctgccacggacgatccctcccgctctcctaactcttctctgaacacctcgcacccccacggccccccgcccctctcttaatcttggccacgctccctgaggggtcagacctggggtgggagagcagagaaagcggggctggcagagacaggggtgagggccgggagaggcgatgacatcattccctggcagctggcggggagagggtggggacggaggggtccccccgacctgagccgagccctcccttcccaagcccatcctcctttctttgggatggttcaccccacctgggcgccattcaaaggaagtttgcgcgtaactcggggcgtcctttccccggccgggtgctgtgcccggcccgcagtcggtgtttcttctgggcctgggggcggcgtggagccggcggctcagtcccctcagtcccaggccttggcagccgctttgttcacgccgggcgcgggccgaacccgaacctcagctgcagcactggcagcgcgcaccggccacgcgtgggttcccggccacggccgggccaacaagggagggtcccgtgagcagccaggctggccctccccgggcctgggtgagctcccaaagctggagcgcagggctctaggccggccccgccccggggctgggggcttcccgcccgtttgtctcattttaacttttgggggcagctctgtcccgaatggtgagtggtccagactctagaaaggggtttggtcgcttgagcccggattgaggcttgggacctttgctctcttgctggggacggaagggggcgcgctgggcaggagagggggcgtctcggtc

SEQ ID NO: 40362 - DNA, 888 bp, Homo sapiens; identical to SEQ ID NO: 25680
  chr4:174430248-174431136
  hyper

SEQ ID NO: 40363 - DNA, 746 bp, Homo sapiens; identical to SEQ ID NO: 29183
  chr4:174443425-174444171
  hyper

SEQ ID NO: 40364 - DNA, 987 bp, Homo sapiens; identical to SEQ ID NO: 30351
  chr4:174450407-174451394
  binary

SEQ ID NO: 40365 - DNA, 971 bp, Homo sapiens; identical to SEQ ID NO: 27035
  chr4:175749838-175750809
  hyper

SEQ ID NO: 40366 - DNA, 1090 bp, Homo sapiens; identical to SEQ ID NO: 23267
  chr4:176922585-176923675
  hyper

SEQ ID NO: 40367 - DNA, 615 bp, Homo sapiens; identical to SEQ ID NO: 23268
  chr4:176986744-176987359
  hyper

SEQ ID NO: 40368 - DNA, 167 bp, Homo sapiens; identical to SEQ ID NO: 25684
  chr4:184667623-184667790
  hypo

SEQ ID NO: 40369 - DNA, 873 bp, Homo sapiens; identical to SEQ ID NO: 25686
  chr4:1993659-1994532
  hypo

SEQ ID NO: 40370 - DNA, 175 bp, Homo sapiens; identical to SEQ ID NO: 33822
  chr4:25013897-25014072
  hypo

SEQ ID NO: 40371 - DNA, 211 bp, Homo sapiens; identical to SEQ ID NO: 17871
  chr4:2639936-2640147
  hypo

SEQ ID NO: 40372 - DNA, 81 bp, Homo sapiens; identical to SEQ ID NO: 15976
  chr4:2672891-2672972
  hypo

SEQ ID NO: 40373 - DNA, 855 bp, Homo sapiens; identical to SEQ ID NO: 22398
  chr4:2704088-2704943
  hypo

SEQ ID NO: 40374 - DNA, 478 bp, Homo sapiens
  chr4:2765725-2766203
  hyper
cgggcagcgggggtgcagcggggagagccagggcctgggcgcggaggaggggctggtatgggaccctccgggtgggcgcggccccgcggggccttgcggccacaccgccaccgtgcccagcggccccatcagcgcatattcaggatgaaccccggacacgcgcccagaaccgtctggtgacccagtgatgaaagctcgaatcttataggatccgtattcatttcccgtgggctcaagcccagcctccgcgggcggcgcgggccctcgcggcgagtgtccacgaggaggcggtgtggacccgcggccccagaccaggcctcaggcagaaggcgagcgcgagcgccccgcccagcccctccccgtcccgcaacccgcgccccgaccagcgcccccagcacctctccaccctcgctctcgagcagtctccacgtttgtctcagaggagacccactttgctccccagcgtgggcccctgagc

SEQ ID NO: 40375 - DNA, 154 bp, Homo sapiens; identical to SEQ ID NO: 25689
  chr4:2926297-2926451
  hypo

SEQ ID NO: 40376 - DNA, 528 bp, Homo sapiens; identical to SEQ ID NO: 24475
  chr4:39447953-39448481
  hypo

SEQ ID NO: 40377 - DNA, 1385 bp, Homo sapiens
  chr4:41752774-41754159
  hyper
cggatgcgaatccaagtgctattacagcggagatttgtctttatttatcccgctctcatgaatatgaatttgcatttgggccgggaggtggctgtatccctttggactccacacatggaatttcccccacgctcatccccctccccaaccacttaagggaggtgggggataggttgtcaagcacaaggctgagatcgtccaagtttcttcgttccctcggatttcgggttgggggatgtgcttgctggttttctgaacgcaactctgccgccgaggcctgcactcaggagatgtggatgtagggagcacaggccggggtgtccaccgccagcccgctcctctgctgtagggtttaagcgcgtttccctgcagaagagagtgaccaggggtggtcaggaggtgatgaatttcggctccaaggcctatttttgacagtaaccaggttcacaccccgcttggcactagagccttactgcacctggggtgtgtctccgcgtggtgcagagcgcgcgctctactccggaagctacggccgggtgccgcgccaccgctgtgcgccctgggcctgatccctacgccctagtcgagtgcagggcagggcaatttcgccgtgggtcctagtttgctgacagttcccaggcccctttagcttttggggaggaggcgagactaggacctaaaaagtgctgggagctcggagtagaggggttcatgttgccagtttctgaggattgctcttaggtgaagatgtggaacttggaaatttaggtggtgcacagaggcacttcctgagcgaaagggagtgttggggtggggagttcagtgggcacctcaggggacctggatgctgacggggcatcagagggtgtcaaaaggagaagctaagggatctgggcgaggtctcagccgaagggcgctggcaagggaagtgcttggccggggagggtgcccggggggcggtcaaggggcaggcccggggctctgtccctcccggtcctggggtcccttcccgtcccgcggttccggaacgcctcgccagccctctctgggcgccccctgctgccgggcgccccctgctgccggccgccccgggtcggggtgccgtgagccttctcgcctttgtaccaggagacctttcagcgccgggcccacacggtcggatgagcaaatgcgcttgacttcattttcccctttgtagaccttgtaggtttattttgttcagtgtcaccatccctcccccaccacccctggcctatcgtccctctgcccgtcttttgtggcccggggtcctgcttctgcttggagatgaaaggcgtgcggggctgggccaggccagagccccagccccagcgccctgttttgttccagttgtgctttctacacgc

SEQ ID NO: 40378 - DNA, 926 bp, Homo sapiens; identical to SEQ ID NO: 29199
  chr4:42152717-42153643
  binary

SEQ ID NO: 40379 - DNA, 438 bp, Homo sapiens; identical to SEQ ID NO: 22401
  chr4:4509159-4509597
  hypo

SEQ ID NO: 40380 - DNA, 929 bp, Homo sapiens
  chr4:46995128-46996057
  hyper
cgcgccccgccgcaagacccccagtgcccacacgcctcttggatcctgcgcccttggtgctctccgcatctatgcggtcacagaaaagcctggcttcggcccctgctcttacagctgagataagaagacctagtccacccagggaggagcgagtggccaaaggggtcccggagctagccatttctccactttccgttgcccacctcctcgcaccccagagaactcaccaaaccgccaggcacaggaagcgcaggagggcgaaactgaccccggcggacagagcgatcgcgggtaccttcttggcagaaaccatctttgcaacatgccatacttcaagcctgttcacgtttccaggctcttcagatgccctgagcagggtgcgaggagagggcagagaggctcccgcggcgtgcgcacactcgcgctcacactcgcccgcgctcagccagcccgagccgcggtgggcgtgtgtgtgcacggggccaggggaggcggaacctgccttcctcgccccctcctttctcgctcagcgctcaatgtgtatgtagagctatgtataccgctccacaccctttcgtgcccgcgcgctgaaggttctggggttcgtatccgcgcgcttgcgctgcaagactcggcaagtttgttccgactgtaactccggggatgaggaacggggtctctcgcccctcctccggcttcgcagcccccgaccccaagtgggctccccgcccacagcagtgttcgtcctcctacctcctggccccctcccttccgctgggatttggatctaaccaatgaagctcctctgtcatcaggttgtgcgaggacctgtttgtacccagagtcaaggttggaggtggagaaagggcgggtgacggggactgctgggcgtcgggtggtagcggtggtgaggagaggggatcaagtcc

SEQ ID NO: 40381 - DNA, 1055 bp, Homo sapiens; identical to SEQ ID NO: 29204
  chr4:47033907-47034962
  hyper

SEQ ID NO: 40382 - DNA, 1294 bp, Homo sapiens
  chr4:4871183-4872477
  hyper
cggggttcagggagcgggaggagggtctgagagaccccaaagcctcccctttgcgagaccactccttgcttcccccgcctggcgctttccataaccctctgcggcgccctgcctctttgttgccccttagatgagctgccccaagggcgggctggactctagtgctttgagtcgctgtttctctgacgatgctgcttttaaaaagaaaaccccgttccctctctgatgactctcgtggcacccgggtggcagcaggggcttctccaccggagaaacagccacatcgactaaaagggaatgtgtgaggcaggctgagaccttgggtggggccccccacctctcgagttttccaagactcaggttccatctctgttaaatggacacaatcctgacccctggcaggtcctgaaagagtagaagggaaggggttctccacgggctgtaccatcacttgcgtccccagttcggtgatggtggtgaggtcatcacagttgttccgcctgcggtgactgcagctgacatgtatgcgcgcttgcctatggatcacaacccttagaatctaagttttccacgcgggttatcccaacgaatcctcactaccaggtgggcacgtgccattgtgacccgtgtcatagactgaagcatagagagttgaatgactcagacaagatcacacagctagtgagagtgaaacagagcttccaactcagacagccggtgccaccatctggcgcccctaaatctcagttccctggtccgcggaatgggaacactttcgggctggtgcagaggaaactatgggtgactccaaaggcagcgcgcggtaagaactccgggtgagaaggggagcgcgcgaggagagcgccaagcgtagcgcggagcatagaggcaggatggtgacctgagcgctctttgctggccggctctgctctccgcagcgccattggaattccttactctccagtcccccgagggtgtgtgtgggtgaggggaggtccctgaggcggaagggatgagcggagtggaagcggaggagagtgttcttgctcttggaaagtgtcagaaagtgcctgtgcgccactctggacccggaattaagacaccttcacctcttttaatcttctccctatgacgcaggcactcttattaatctgtttcaagtgagaaaaccgaggcacagagagcgtatgtgacttgccaaatgtcacataggtgtctaagacccggcctgtatttcccaccaacctctgccgctgcttctggcatgaatgcagaaagcagccaacagccgacc

SEQ ID NO: 40383 - DNA, 1460 bp, Homo sapiens
  chr4:4873214-4874674
  hyper
cgtgcctcgtctttggtgattcccctacccccaaatcagagagggttccggaagaaacttcgcagccttgcagagtgaagcatcgccgggacccaaggatgtttctcttccctacggagctcacccggattccttggcgcccagctgcggccccggagtccccgaactcggctgtgccagcccggggcggggccagctgaacctcagttgtggggcggagtccgttgcggacaccctcaccccccgggcaaccgcagctcccaactccgctggctttcccctccctctgacaccctgcgcggctcctgcgacccaggtgcgtgccagctgtaggagcctgctccgcctgccctcctggaacgcagtcatcctccaggccctgcccgcgcccatttcgcggcccaggaaactgaggtgtggaagcctgtgaagggagggactgctacctatcgattcgtaccggatccagaccctgtgctaaacgctcggcgtgcatggtgccccttaatcctcacaaaagtcgagcgacttagggaggaatattatcccattgcacacacgagcacactgctgcgcagaggcacgaaggtacctgcccagggtctcagctagtcccatttccaacccaggaaggcaagggagcaacccgggaagcaaaatgtaaggagacactttcagggttgtgcaagtgtggggtgggcacccggggagaagggaggagggatgaactatccagagaggaaggcacgcccggccccgacttatcggaataattgtctccattccgcttcggcggtgtctgttgtgtccattgaacagaagcagaacgtgagtccgtatctgcccctcgccaccgccaccagcacctgggatttgactcacacttcaattcctgccctaggaattgatgccagcgcccagtatggccccgcgtggggaatcgagcgccccatccctcggtgagggcttactctgagcctgagtctgtggcaggcccccccatagctactgtctgccttaatccacgccaaggcctctaaaggaaaacattgccttggttctttttcacagacgtgtcaactgtggaccagagatgtcaagccacgtgcccaaggtcaccaagcagtttctgggtgagccctcagggaatcctaaatcccgacccaaacccgggatttcccctcgccctcggggcctccaaggggagctgcgagaggcggggacgcaaggaggcgctgggaccagtttgctctgagtgctcctgctccggactgctccttggagaggcggggccttgggcagcagaatcccaagctcctcccggtgggaaatccggcagctcccgtctgagggtagggccagcagaccacctggcccagtaaactccaccggcttcgggggtggggagttggggcaggtgcgccccaggggctcggtatacaaagccatgcctgagccac

SEQ ID NO: 40384 - DNA, 76 bp, Homo sapiens; identical to SEQ ID NO: 7402
  chr4:56222936-56223012
  hypo

SEQ ID NO: 40385 - DNA, 956 bp, Homo sapiens; identical to SEQ ID NO: 28045
  chr4:57521845-57522801
  binary

SEQ ID NO: 40386 - DNA, 398 bp, Homo sapiens; identical to SEQ ID NO: 33827
  chr4:619513-619911
  hypo

SEQ ID NO: 40387 - DNA, 1287 bp, Homo sapiens; identical to SEQ ID NO: 31904
  chr4:628147-629434
  hypo

SEQ ID NO: 40388 - DNA, 533 bp, Homo sapiens; identical to SEQ ID NO: 27051
  chr4:650837-651370
  hypo

SEQ ID NO: 40389 - DNA, 175 bp, Homo sapiens; identical to SEQ ID NO: 22411
  chr4:757757-757932
  hypo

SEQ ID NO: 40390 - DNA, 895 bp, Homo sapiens; identical to SEQ ID NO: 27057
  chr4:81187647-81188542
  hyper

SEQ ID NO: 40391 - DNA, 997 bp, Homo sapiens; identical to SEQ ID NO: 34876
  chr4:81951925-81952922
  hyper

SEQ ID NO: 40392 - DNA, 833 bp, Homo sapiens
  chr4:82135701-82136534
  binary
cgacgaagcaaagccgggagcgcaagccctgacagcaccgccaagcccctagctcggagcaacagcctccaccgcttctcctcgctaaacctagagaaccctgaggactccccactggggctgagcccctcccgccctcaacagaacctctaaacacaagtagcctttccctgcctccaggagctcacgaaacgctgccacaccgagcgaatgcaacgcgtacacacgtccacactcgaacagcacaagcaagagaccggctgggtgtggaatagaggcgcacatcgcgcaacgcattcacagcatgcacacgcgcgcaccccgaccccgtccctccccgcgcgccctcacaccccggcgcccaagacccccggcccacgaacctcaccagacagccgggtaactttccaggtgcgcagcttgtcacctcggcgcggccgcccctgcgtctcagcgtcctctcccacgccgccctccccagccgcctgcggcgccggagcccagcgcaggtcagctcagccagccccgccgtgcacacggtgcgcagcgtgggcccggggctgccggctcagtcgctccggctacgtgtgagccgggggcgcgggttagcgcgatgcgggcaggagctgcggcggcgtcggtgctgccgcctggctccgcggcgggggccggtgcagaggagacacgcagggagggagggaagagaggagggaaggaggagggagggggtcagccggggctactgcctggatagttgggcgccggcttccctaaaggtggggtcacccgcgcccgcacgcacactagcccgaacctttactcccgacacagcc

SEQ ID NO: 40393 - DNA, 998 bp, Homo sapiens
  chr4:85418198-85419196
  hyper
cgggcggtggagggctcaccgctgccgggcctcactgcttcgaagagaggcagcgggttaggctggcgaaggcggaatggggcgctggacgacagggaggagccgggaaagcagagatgcagtggcctctcctcccctctcctccccatctttctaatccaggccaggcctgcggtcctggccaggccgtttcaggaacagccagggcctcggacgagacacacgtccctcaccgcgttgtggtccacacgaacacacacacaccggctcagcccaggcgtactcaagacttagagagagggaggcgcttggatacagccacgcgagctcagaaaagcgagaatccctttctggaagccctggcccaacctaactggtgtgattccggcgctgtcaaactactggggcgggccacaggatggactgagcggcatgcacaccaggggccgcgacccgggagtgggcagaacaggcacggcaggcaggcatcggggcgcgggtggtagtactcacgaggggtacaggccaggcgtgcgtccctccagggcgggctctgcatcactccgggccagaagatgggcgtccggccaggcagctcagccagcggcttggggtaccggcccacggcggccacggccgcggcgctggggctgaagtagagcccgggcggcggcggcggcgggctcaggctgctaaagcgtggcagtccggccagcagccccgccggggatgaggcggcggctgcggccgcggcagcagccgcggcggcggcagaggcggaggaggcagaggcggacgaggaagaggaggaggaggaaccggagggcgaggcggagggcagggcggcccccgaggccacgggcatggagggccggctcaggatatcgttgatgccgtgtggggtggcggccgagagctgctgcggggggctgccgagggatgagagcccccccgtggccgggggcttcaggccgcctgggttgtgggtgcccagaggc

SEQ ID NO: 40394 - DNA, 960 bp, Homo sapiens; identical to SEQ ID NO: 22914
  chr4:8861937-8862897
  binary

SEQ ID NO: 40395 - DNA, 76 bp, Homo sapiens; identical to SEQ ID NO: 24488
  chr4:95127605-95127681
  hypo

SEQ ID NO: 40396 - DNA, 310 bp, Homo sapiens; identical to SEQ ID NO: 8554
  chr4:99399725-99400035
  hypo

SEQ ID NO: 40397 - DNA, 1887 bp, Homo sapiens; identical to SEQ ID NO: 22915
  chr5:100238197-100240084
  binary

SEQ ID NO: 40398 - DNA, 963 bp, Homo sapiens
  chr5:10564767-10565730
  binary
cgaggaggagcacggcgtcgagagcgcggagagcgtcccggagggcgtcccggaaagcgtcccggagacggcgaccctcctgcgcgccgcctgcgccaacaacgtggggctgctgcggacgctggtgcggcgcggggtgagcgtcgaggaggcgcaggagactgaccgcaacggcagggtaagcgggcgtccccgcaggatttgagccccctcactgcccccactcccctcctccccaccacatccccgcgcctcccagctcctggctccggaccggtccctcggtcactcagccgccgcccagagcgccttttccccgctgtttgggagcgcggtgccctgggtggcttccccgtctcaggctgggggacgcggtgcggggagggagcagtcgaggtgtcagcgcggcagaaacgccagtccggcgtcctcaccgcatccccttctcgtttaccggtccccgtggacctcctgactgaattcgcgctggctgcccgtgctgcaatccaggatgggcttcttgcggcccggtcccctcctgactattacctttccccaggtccctggcaggggaccattcctcctcccctgcaggagacagcccctcctgcccagcgccccatttggcccctgggcccctcgcgccgcccttgtcctaacacgctggggcgcagatcggctcctccagccgcaatgatttggaagcaacagtttcttccctcgccgggacagcttggtcccctaccccacctccgctgagctttgtggcccgcgccgcgaccagccaacgtgatctctgactggtctgtccgcaggtcaccttcgcgagccaatgccagccggggctccccagagtcagggcatagggagagccccagagccgcgggcatccacccgggtagggcaggaggcgtggaggcaggcacaggctatcctttcgttatgaccagattcagagaaaac

SEQ ID NO: 40399 - DNA, 1400 bp, Homo sapiens; identical to SEQ ID NO: 27066
  chr5:112629411-112630811
  hyper

SEQ ID NO: 40400 - DNA, 1673 bp, Homo sapiens
  chr5:115151178-115152851
  hyper
cgacggtcgaatatttaatctgcgaaacttggcagtggatttgaataaacccacagtcggggaagttagttaaattggtttgggaaagggaacagcagaaattccgtagtggcagctgacggccacaagacgctattttacatgagtaaaaatgcttgctataaggtgcccggttgcaggcgaccgaaggcgcagtgatggagaactgacgcgggtgacttgtcttcttcaacatcacacacttctcccgatggctgatgtagtgctcccctgggagcaccctctgctagtccggccagacggttccttaaggtgtcaggagggcccgaacctgagtgcggtctctccgcatctccgcgcccggggttaacgatggcttgggagtgtgggcattgctcccgaggccaggggcaggaggactggtggtttagaagcagaggggtttgcgggagagaagagaacagaaaatctcgcagacgcgcggtggcctcccttcccggcgcctgtccgccgttcccggccggaggtcagcaaggccagtaggatccaccttccgcctgcgctgtggccgcggagccccaagcgagtcgtgccagccccgcggctggccagcgagggggcgagcggcggacgcagcgcggcccgagcttcccgagccagtcactttgggctgcgtcccccacgtccattcctcctcagacggggcgagtgggcgccgcctggcattgaagctgcagcgcgctcacctgtactggtcgaacttggcgtacattgcccactcggtggggtcgctctcgtaggcttccatgatggcctgcacctcctctacattgacctcatcgccggcaaagagctggtgcaggatgcggatcagatcagccagggtccgtggcttcagcacttcggtctgttccatctcgtggggagctggctgcgcgcgcgtctcactgctgggctgcggtggaggagctgagcgagccaaggagctgggggcgagggagcctaacagcccgctagaccgctaagcagacacacacgcacaaacccagcattagagtgccgaaacgtaaggatgtcgtcgcagagacagcaagagacccacccccaggcccctggcagcgcagtggatccgggatcgctggagacgcggtgcacacacaaatcaggttcagatctgtggggttcatcctcccgggccccttttaagcgcttggagtcactaggaatgtaccaacggccctcggagggaggacgaggcggagagccacccaagaaaggtggcggaggcggggagaccctgcgggcacggctcacgcgcacatccccggcttccccgggctccgcgccttcccaagagccccgttgtctccggcgtcccagggatcgcgtgggctccgcgcaatctctcccccactttaacggcgcgttttagccgcccggcctaacgcctctccccgctccacctccgccgctgtggttcgcgacgctgggacgtagacaaaaagggtcggaggagatggctgcggggactgacgctgagtaaaggaggaaaagaaaagggaaggagagggacacttcttccaaatagagaattgtgaggagcctgcgaaaattgaggatggattccactcctaggccagagagtgcctgttttgtcgattgaaactatccac

SEQ ID NO: 40401 - DNA, 995 bp, Homo sapiens; identical to SEQ ID NO: 29222
  chr5:115297640-115298635
  hyper

SEQ ID NO: 40402 - DNA, 220 bp, Homo sapiens
  chr5:1193762-1193982
  hypo
cgtgggcgcttacctcggagaactccgggcatgaatgtgcgaaaggcaggaacagacgtccacggcggctttcatcctcatggcgcaaacgggacccctaccgtcagcaatggagccgtgaaggagctgcagccgtggacctggagcaggcacagcgagccagggtgcgaggcccggacagctctgagcggaacagcgagccacctgcagcgtccagctc

SEQ ID NO: 40403 - DNA, 709 bp, Homo sapiens; identical to SEQ ID NO: 24492
  chr5:132082800-132083509
  hyper

SEQ ID NO: 40404 - DNA, 392 bp, Homo sapiens; identical to SEQ ID NO: 29235
  chr5:134827217-134827609
  hyper

SEQ ID NO: 40405 - DNA, 541 bp, Homo sapiens; identical to SEQ ID NO: 24493
  chr5:134880146-134880687
  hyper

SEQ ID NO: 40406 - DNA, 796 bp, Homo sapiens; identical to SEQ ID NO: 31936
  chr5:140800452-140801248
  hyper

SEQ ID NO: 40407 - DNA, 1482 bp, Homo sapiens; identical to SEQ ID NO: 28062
  chr5:142781722-142783204
  binary

SEQ ID NO: 40408 - DNA, 1698 bp, Homo sapiens; identical to SEQ ID NO: 28063
  chr5:142783606-142785304
  binary

SEQ ID NO: 40409 - DNA, 453 bp, Homo sapiens; identical to SEQ ID NO: 11727
  chr5:14328256-14328709
  hypo

SEQ ID NO: 40410 - DNA, 443 bp, Homo sapiens
  chr5:148520933-148521376
  hyper
cgtccatctcacaaggcctcgtccatctcccatcacaccctagggcccaggcagaagcccggcggggcggggcctcggacacgcgccggtgcgtccagcaggtggcagcagcgagcggccgcgccccctgcgctgccaacccgcgagcccgcatcatggatgtcgagctcccctatttcgcattgctagccctggaattcgagaccccagacgaggaccaggattcatgaaatcagtcgcaggggccggggcaggggcctctggctcccgacactggccgagaggtgggttccggggcgggtcgctgctccttgaagccgggcggggacgcgctgcccccgccctgcctccctgtggtccacaccccctttgggctccggagccgctgggcaggaatagtccggggtgcgcgcgagcaggcgctgccaaccccacttctgccc

SEQ ID NO: 40411 - DNA, 831 bp, Homo sapiens
  chr5:148650971-148651802
  binary
cgcggcgaatggagaagacaagcccaaagccaggaaatgggtggcggctgcagggaagggggttttgattccctaggataaaaacgcgctccaacagtctccgcattccggcatggagccggctgaggggtgcggtggtaagaccccatcgctagcggagtgcaagcaaagccgcacacctcctgggtccgggctggggcaggccgcgcgggcgcgggaacgaacgcgtgcggacggggaaaagggtcctccaagcccaagtgggagcgccgcggagggcgagcgagcggcagggcgcggcggggcgtgtgcggcaccacgggacagcgggctgcggcccagggggcgaggcgtgctcgggtctattccgggagcggctctgaggggcgggcgcgggcgcgggcggggcgggggctgccggcgagcatcctgtctgggggaggggaccgcagagagcgccggccgctgggctggcctgagagcgcagcgcgccggccgctaccagccgcgccggagcccctgcgccctgcggcccgctccccggggaccgggccggcgccatggaccgaggccagggtaagaggggccgcgacgcccgcacttgttgcggcgccgggcgggaaagggagactggacgatctgaagccggagaggaggagggagagaggcgggcggtggggcgggggctgaggaacgctcggaggggactgggagacgcggcgcttatgcaaaggtgccttcggctgccgggacaacccggtgcgtgtcaacgcccgtgtcctggggccaactcgcctctcgtgtgtgaaatcagagttttcataggctaac

SEQ ID NO: 40412 - DNA, 331 bp, Homo sapiens; identical to SEQ ID NO: 25715
  chr5:151066267-151066598
  hyper

SEQ ID NO: 40413 - DNA, 707 bp, Homo sapiens; identical to SEQ ID NO: 30391
  chr5:157098032-157098739
  hyper

SEQ ID NO: 40414 - DNA, 760 bp, Homo sapiens; identical to SEQ ID NO: 23297
  chr5:160973379-160974139
  hyper

SEQ ID NO: 40415 - DNA, 926 bp, Homo sapiens
  chr5:160974514-160975440
  binary
cggggtcctgttttctcgccgtgtgacgttcctgacccgctagtccgggttatttatagcaggaggggaggggggcgaggggagcagaaaggcaatgctgtctctccaggtttcggtctgattctgcagtgggaattattagtgggcagggtggggtttgcatgagggggagatgggacgtggaggcgtgagggatgcgggtgacgggcgccctagcgcaggtgcgggggactggagggcgtgggcgaccgcacagagcaggaagggcaggtggccgggtgggacgcgccccggccggtcccccagcgccccctccgctgcgcgcacccgcgcgcacacacgtgcaggcgcactccccacccgccgccatccctccttacctcgcaggcccgcgctcgccgcccactcccgcggcgtgcggagctggcgcccccggcccctcgtccgggacaggggacggggactcccggctgttcaggggctgtacctctggatacaagaagccggagcggtccctagaaggcaggcaaaatgaggaagagcccctcacctccggaggcactgtgttctcccgcggtctccgcgccacctcgtcctcttcttcccttccccgcgcccaggggactcgcacacccagaggctgcctcttcccttcctcctgaagctcaggccgcctcgccgtggccgccgggacccggaggaggcagcaagcttggggtggggaaattgggggagggagatactcaattcacaaaagaagtcttccctccgctccagggaaagagaggagccacgggcggcgtgaggtgctacgagtctggggacacaaggccgtccgaaggaaccggagtccacaccagcggctctccgggtactcctgagtttatcttggaactggggaagaggcgggaagagtagacgttccc

SEQ ID NO: 40416 - DNA, 795 bp, Homo sapiens; identical to SEQ ID NO: 22921
  chr5:169063996-169064791
  binary

SEQ ID NO: 40417 - DNA, 687 bp, Homo sapiens; identical to SEQ ID NO: 27091
  chr5:170171114-170171801
  binary

SEQ ID NO: 40418 - DNA, 699 bp, Homo sapiens
  chr5:174119512-174120211
  hyper
cgtgtcctcctgtgcagacgaggaaactgagtcacacgagaggaagcaattgctgatagttcacagttgccacgccctcctcatgcctttacagacatcccaggcctttgatcaaactagggagaggttagaagaaaggcgagacgggcctcagaagaatttggatctgttgaaaaaggattttaggacaagaacgaaacaagacgcgttttcatgggaacgcaaacccagtaacttctcagagccagggcttcgcagagaaactgcatcaaaaggaaaagagtctggtcccaacctttatttctcccaaggcatgaaactcctgatttcaaaccacttctctttgcctctgaaagaaaacaagaaaaagatggggctgtgtagttcttccaacagtgaaaaaaagaaagaaaagagagaagaagaaaactgtttcgggtttcgaaacagaaagggcctccttcccctttatcgataattttgaaagggtcgctgtaagacactgactaatgacacgtgacctttggattctccacgaggcagcaggcgcgggccccgagcccagcggggacccctctgccagttaggggtcactctctccattcaacgctttattagccccctcaagtctcagggcgaagtcctgctgctttgagacgtttacagctttgattgaggaaagctattcagggctggggc

SEQ ID NO: 40419 - DNA, 1034 bp, Homo sapiens
  chr5:175792170-175793204
  binary
cgatgcggcgttgggcgggttacttaactcctgggcctcggttttcccttctgcgtggtatcattgtaaggggtaacggagaaaagccgtgagctaacccctggtggatgctagcaagcaccgccgtctcccgtcctccccaggcacagcctctccttcctccaccctgcacctggcagggggaccggaggtccccgcgcgccggccagcgccccaccacccacgccgccgggtcccgggcggcctgccgtgacagcggcagtgcattgtggggcttgtagtgcgggactgggtctgggtgggtgggcgcggccgcagcagtcgcagcggggccatcttcggcgggcgagtgggctcggcctgtgcaacccgcacctgcgtccctcgcccggcccgatggcgccgcggccgctgggccccttggtgctggcgctgggcggcgccgcggcggtgctgggctcggtgctcttcatcctctggaagacctacttcggccgcggccgagagcggcgctgggaccggggagaggcctggtggggcgcggaggctgcccgcctccccgagtgggacgagtgggacgtgagtgccgggccgaggcctgcggaagggcgggcaggctgggctgcgactccgcgcatgtggccaaggggtgtgaccacggaacggccctgctggtgccgggagcttggggggtcgagggcttggcagccgcagcgcacaggccccgcgcgggtgggcggtcagagcccgggaaccgaggaacgggtgggtgtgcttgggtgcgtgcggcgccttggcgccacgccgtcgctccacgccatgaggctcgggtgttccagcgggggccggagtttggagggcgcggctcgggagcatcccggggcccagccgggtcggctcgcgcccctccggcgcctgcgcagtgcaccccgcccgggggtggggatgtcgggagaaaccccatcccctcccgcctgcggtcgggactccgagaccggtggaggaagcggggcgcgcgagcgtttaaggaattc

SEQ ID NO: 40420 - DNA, 274 bp, Homo sapiens; identical to SEQ ID NO: 33847
  chr5:176225713-176225987
  hypo

SEQ ID NO: 40421 - DNA, 30 bp, Homo sapiens; identical to SEQ ID NO: 25726
  chr5:178987428-178987458
  hypo

SEQ ID NO: 40422 - DNA, 561 bp, Homo sapiens; identical to SEQ ID NO: 22440
  chr5:180257880-180258441
  hyper

SEQ ID NO: 40423 - DNA, 457 bp, Homo sapiens; identical to SEQ ID NO: 22441
  chr5:180258503-180258960
  hyper

SEQ ID NO: 40424 - DNA, 841 bp, Homo sapiens; identical to SEQ ID NO: 27098
  chr5:1931173-1932014
  binary

SEQ ID NO: 40425 - DNA, 686 bp, Homo sapiens; identical to SEQ ID NO: 23298
  chr5:22852983-22853669
  hyper

SEQ ID NO: 40426 - DNA, 973 bp, Homo sapiens
  chr5:2751809-2752782
  hyper
cgctcgagtttccgagggacattggaacgcgcagctgtccatcacgcgctcatctgcatattcgggggcccgcccctcccctgctccgcccgctgcagcctccgggccgcggccgggggaggggcagagagacgggagggaggcgggggagggcggaggcgacggaggcgggcggcgggagggaccggcaggcttttgtggcgcagccgcctctctagcagctccggccccagcccgcggctcgcggacctgcagcccagcccggccgcgctgcgtgccccggcgcgcacccctcccactcccatccactcggagccacgtcccctgcccggctccggccggctcccaccgtccccggccaccgtcttcgcccctgcccggcccccgccccttccagccactaccccgcccccacccccttctccaccctcacggactaggcagaggccgcccgcggtcaggccaggccgggtccaattaggggactcacagcctgccccgctgtgcaccccgaggaggcccggcccctgtgtccaatccggaagtcgcagggaagtggggaggtcaggatggtggcgcccgcggctcgggtcttcctccgggcagtgcgcgcggctctcacttccacggtcccggacctgctctgcctcctggcccgaggctccccgcgtggcctcgcgtctggtcgcctacccctcgcggtccactccgcccagcatggacctggatccggggcgccttggttgcgaattgccaggagggccctgaggtgagctttctgcccccaaatccgcagcgcaacccccggggccctgaacgttacgactttccactgttgggaatgacgccagggcttcagctaagaagacgccgtcccctaaagagttttattttattttgtttttctaagttgactcctctttcagatttgtgttgtcaaaacactggggggatgattgttacctgacaaacc

SEQ ID NO: 40427 - DNA, 71 bp, Homo sapiens; identical to SEQ ID NO: 15081
  chr5:31410355-31410426
  hypo

SEQ ID NO: 40428 - DNA, 914 bp, Homo sapiens; identical to SEQ ID NO: 31964
  chr5:3324702-3325616
  hypo

SEQ ID NO: 40429 - DNA, 130 bp, Homo sapiens; identical to SEQ ID NO: 22447
  chr5:3326328-3326458
  hypo

SEQ ID NO: 40430 - DNA, 1567 bp, Homo sapiens; identical to SEQ ID NO: 25731
  chr5:40680513-40682080
  hyper

SEQ ID NO: 40431 - DNA, 1687 bp, Homo sapiens; identical to SEQ ID NO: 23300
  chr5:42950747-42952434
  hyper

SEQ ID NO: 40432 - DNA, 1290 bp, Homo sapiens; identical to SEQ ID NO: 24515
  chr5:42994313-42995603
  hyper

SEQ ID NO: 40433 - DNA, 1012 bp, Homo sapiens; identical to SEQ ID NO: 25737
  chr5:43007481-43008493
  hyper

SEQ ID NO: 40434 - DNA, 1263 bp, Homo sapiens
  chr5:490894-492157
  binary
cgcccacgtgacgggcctgccatccatgagcctgtctgtgccctcggcagctttccctgggctgcacctggtgggtgatgctggacggcagggactacagggaggggtgagaaggcgccaaggaaccacgtgctgggtgaggcggccccaacccgggagctcctctttctccatgcgtctccttggtctcaggtttcagccccttgattcccatggagaggccgggccgtgctctctcttgaaccagacggaaaatcgccaattcttgtgagtctggttcagctggtggatttgtttgaggctgagttctcagaccggtgagggcggcaggtgccggaggcctgcgctcagccgtggggcccagctggtcaaagctaggctctgcctgaggtccctggacccacctggtcaaagctgtagcatccccggcagcagcggcgggcatcagggctgcaccgcacctggcatgttgagaggcgccagccacgcgtggtctgggtccggggcgggaggcagtgcccgagagatgaagcatccaagaccaaaaccgcgcagcagttctggctccggctgtggctgcagcggtggccgagcggctccggcacacaggctgggagggacggtgcccgatacaccaggctctgcagtcctcctcctctccctgggacctggtggccggcgagtgtggacggacccctacctctgcccagtgccggaggaagagcggcagcccctggccacctgcagcccccaagccgagctgccgagatgggaactcctccccaagcagaacacgtgctgggacctggggacgcgcaggggactggccttggtcacgagggcctacggggctgccagccacgtttctcacctgacacttaccgcctggaggccagggtgcggcaccccgacctttctgagatgaggcagcgccgcccctcccggaccccaccctgatcccggccggggcaacagtggcgcagactcacccatgagcccactgaggaagacgccgtagagggacagcccggtggtggccgcgttccacacggtacccacgacggcgtacaacaggatggtccccaggttgccgaagaagaggcggttgggcatgaagtagccggcgtccagcacgatggggggcagcaggtagaagaagaagacggtgggcgtcagtgtgaaggacgcgatgtggtcggccgcccagacgatgccgcccagcaccaggcccagcacgatgagcagggcgctctcgggaaccac

SEQ ID NO: 40435 - DNA, 742 bp, Homo sapiens; identical to SEQ ID NO: 27105
  chr5:49736607-49737349
  binary

SEQ ID NO: 40436 - DNA, 835 bp, Homo sapiens
  chr5:524047-524882
  binary
cggcttagcgcggccagagtcgctcccgagtctcgctctgctggacccgagagccggactctcccgggcggccgccgcgcggctccgacctgatgcgcgcggccacaacgaagcccccaggcccagcagaggcggccgcacaccccgcgggcagatccggagaccccggggccacttaccgatcttggccaagctggccacgaggatccagagcgcgatgacgtagggatcctgcacgtgggcccactcgaaggtgaccacctggaagcccccgctctcgccgtgcgcgccgccgggctccacctcgacgcccccggcccgcgccagcccgcccagcgccagcgccagcagcagcccccggtcggggccccgggccccgagtccccacattgccgcctgctcagcgcagggctgggacgcgcatgtcgcggggggtcccggctgggctgggccgacgcgcggggctgggacccggcgaggacccggcgcgctccggtgccggtaccggctacagtccgatccccgcccgccggggtggcctttaatcccgcggccccctcccgccccggggcggagcctgcccgcccccgccgcgcactcgcgagcgcagacaccgccgcagctcccggcacgcccgccccgcccgcgcacgcccaccccgcgctccctggtgcccaccctcccccggagcccgcggcctggaggtccgggaggtcgcggcaagagcgagcccgggactgcgcggccgccttcctggggcgtggggagcacagcgcggggcagcgggacaggcggttccgcgcagctcctgggatgcccgggcagctgtgggtgc

SEQ ID NO: 40437 - DNA, 1069 bp, Homo sapiens; identical to SEQ ID NO: 24517
  chr5:54518558-54519627
  hyper

SEQ ID NO: 40438 - DNA, 887 bp, Homo sapiens; identical to SEQ ID NO: 29274
  chr5:54526958-54527845
  hyper

SEQ ID NO: 40439 - DNA, 772 bp, Homo sapiens
  chr5:57878645-57879417
  hyper
cgcctgcccctggcgaggaaaagagcaggggagactgggagaggtaacccaggagcgtttggaaaggagtagggaggctccgcggccgagcccgactggcggatcgagcctgtttaatggtttgcttgcttgccgggagttgtagttcaccgctcgcccgtttgccgggaacacccggagggcgagactacagctcccaggagtgcacggggctcctcggcagtacgcgtgtgcggcgccaggagaggacagctccagtgctgatgttggagccggttagcgaaccccaagagtgcagagtgtggagcgtggagcgccgggactgtgcacgcttgaccggaagcccagaccagtgcggtcctagccagagagaaaggacatttgccaacaatgagacacgaagcgcccatgcaggtgggtccataaagaaagagtggcctcgggaggaattgaaagagatgcttttccccttgctccgcgcacaagcagttcaacgtaaggaaaggtctaggcggtcacccgcggagatgcggctctgtgacatgaccctgggaacagagttgggtttctttacgctctgtgtggctgtgattggggctgtcttgatgagggatcgggctattcgcaatctttctaggctctgtaaagaggataagagtgtctgtctaaaatgaaaacccaagcaaacaaaagtcagaggagcatgcaatctcgtgttggcattgatctcctctcttggcatccggggtttgagatcgcggtgaaaactcac

SEQ ID NO: 40440 - DNA, 489 bp, Homo sapiens; identical to SEQ ID NO: 22459
  chr5:64398796-64399285
  hyper

SEQ ID NO: 40441 - DNA, 330 bp, Homo sapiens; identical to SEQ ID NO: 38513
  chr5:67590957-67591287
  hypo

SEQ ID NO: 40442 - DNA, 990 bp, Homo sapiens
  chr5:72594568-72595558
  hyper
cgttctctgtgcagcttcaaaaaactcagtaatttcgttagaaaacgttgaaatccgaccccaaagtattcagcccaaatgtttagttaaagtaaccccgtgggttaataaactaaacaaaggcaacccatgcaaaaccggagcaatgaaaaccaggctacataaacgaagggaagtttataagaactctttgggaggaaaaaaagagaaaaggcaccgggcacggaggtttaatgtgaagcatgtgagcggggctcagtttacaggtacgcgggccgatggcgaagagcgctgtcaagcggcctcgaggatttcggggggtttgcgccgccgaggaaaccctacccggacgaggcgagcagcctggtggccctggcggccgcgagctcccggctgccaccgctaggcgcccccgcccggcccgccggcgctccgagggcaaacccgggcggcacagccgtgcgccctgggctccgcgcgcccaaggaaagggcttcccagtcaccctgcggcgacgcttctccctcccgggaatgacaccttcgctcgctttcacacagccaagccgttggagaggcagaaacagtgggtcccgagcccgcaggagaagttcccatcccgcccctctagccctcgggcgttggcagtggagtaacaaagacgctgccgcgccgttgaccccgaagaagctctgatgaaaaggagggcgggccgcgggataggagtttctacaattagttttttctgcctttacgttcccaagaagaagccgaggaagtagaaaggagagagatctgggaaaggcaagatccagaaatcaggagccattatgtttctcattttggagaaaaactgtaaaacagctcggcctcttgtccaccttgccccgaaggcaagtctggatatgaaaagaaaaaggcgggcaacggaggagatttatttttcattttaactttcctctcccaggcttcctcaccccctgcccccttc

SEQ ID NO: 40443 - DNA, 807 bp, Homo sapiens; identical to SEQ ID NO: 29283
  chr5:76923694-76924501
  hyper

SEQ ID NO: 40444 - DNA, 173 bp, Homo sapiens; identical to SEQ ID NO: 19786
  chr5:77291967-77292140
  hypo

SEQ ID NO: 40445 - DNA, 112 bp, Homo sapiens; identical to SEQ ID NO: 22464
  chr5:86672217-86672329
  hypo

SEQ ID NO: 40446 - DNA, 561 bp, Homo sapiens; identical to SEQ ID NO: 32001
  chr5:87955365-87955926
  hyper

SEQ ID NO: 40447 - DNA, 405 bp, Homo sapiens
  chr5:87979367-87979772
  hyper
cgaggctctagctttcccctcctcctttcttgatctcggcaaacaaaaccattctaccacttgagccatctgccgcaggtgtaatggatggcagggggccgacctaaccacactccagtctcttctaggtcgtcaccgctctgcaccaaacaaatgagtcctgtttcaccactagggtgccgaggtggatggtggatgctggcccccgcccctggcagcgctcagcccttagaaaccagagccagctgacaacacgcgaaacacacaggcacagcgaaaacgccgagccgacgctcattccctctgccccctccctctgctctctgtaacaaggaggacacgtacacagcctttacacacttaaaagcccttgcgactccctctgaattcttagttacttatgac

SEQ ID NO: 40448 - DNA, 671 bp, Homo sapiens
  chr5:87979860-87980531
  hyper
cgcgcgcgcacgcgtgaatgtgcatgtgtgtttaaaacgcttattggtaggtcatcagcagctgatcagacatggtaatccaataatttttttgaatacacacaatttttcgttgaagttaatttttttaaagaaaaatggaaaactattaattttctgcgcaagtctagggttcccagtttaggttccagagaacagcagatctgcgcagcccccgccttaccaaactttccttttctagggtttgaaagaggctcacattctcacttcatgacagagcagcggctcatttgcacgcgggtgtgtaaaggagggagctgtcgaacgcgcgacttaggaagggaaatcggatagctggagccccacgcagtcgctcggaaccttggctggaggcacaaggtgcccaggggcaagagcccggggtccaagcttccaggcgcacatcatcctctgggccccgggccctccggctggagcactccctcacccgcatcccatccccgttccattttgatcattatttgaatagcccaggtaagggtgcccatctctcggctatgggcgggggctggaccctgacaggtacggactccgcgggaccccagtgtgcttacctcgagcgaggccctggcaaatggtggcccagaagcatcaagtttcctctcccagcc

SEQ ID NO: 40449 - DNA, 138 bp, Homo sapiens; identical to SEQ ID NO: 9831
  chr5:87982673-87982811
  hyper

SEQ ID NO: 40450 - DNA, 256 bp, Homo sapiens
  chr5:87983380-87983636
  hyper
cggcactgaggagtgtgctttaaggttatcagtcttataagcaccacgtgattagacaggaaaggtaacttgaaaacacaacctgattctgagcgaaatcattttgtcctgttggcatgaaaatgtagttacacctccaagttctgctcaggaacagacggctgcgtgtgggggctggtccctacccagatcagtacaggatcttcagctggcagacgagatccagcaaatggaattcacgaagaaactcatgtgc

SEQ ID NO: 40451 - DNA, 108 bp, Homo sapiens; identical to SEQ ID NO: 22472
  chr5:87984851-87984959
  hyper

SEQ ID NO: 40452 - DNA, 809 bp, Homo sapiens; identical to SEQ ID NO: 23313
  chr5:88184868-88185677
  hyper

SEQ ID NO: 40453 - DNA, 460 bp, Homo sapiens; identical to SEQ ID NO: 29295
  chr5:92906252-92906712
  hyper

SEQ ID NO: 40454 - DNA, 991 bp, Homo sapiens; identical to SEQ ID NO: 30459
  chr5:94955931-94956922
  binary

SEQ ID NO: 40455 - DNA, 446 bp, Homo sapiens; identical to SEQ ID NO: 22473
  chr5:96111437-96111883
  hypo

SEQ ID NO: 40456 - DNA, 132 bp, Homo sapiens; identical to SEQ ID NO: 16019
  chr5:96121466-96121598
  hypo

SEQ ID NO: 40457 - DNA, 789 bp, Homo sapiens
  chr6:100912523-100913312
  hyper
cgcccatctcttaactgttctcatgcctaccgtccaacccagcgacaccgccggcctctccgcttcccaccggcagagaggagcagagcattcccggctcccttttctggatcatgaattggaggaggggtgcgtggcagaaagaggaggatgcaagctttgggacgagtgaggtgattttagaatcctggtcctccgtagttgctacgaagccagttcactattattcctaattggaagccgaaaactgccccccgtaacttctttatagcttaagggtttagcttcaacttcactccggggccgcctctctcccgccctccctcaatgccactcacaagccccctcgcctcccattggcctggcgcggccaggggcgaggcgctcattggccaatagggctgagtgacacgagtcggccccgagccgccctccgcgcgcccaggctccgggctctgaatcttactacccgcgggaccgctggactcctaatgagctcagggtgccgggtcggcgctgtccggttgccgccgctgctcgcggcctcctgggccttcccgacgtcgtgcgcgacccgcgctcctcgagctccctggggtcgggtggttgagcgctcagtccagcgcggcggcccagcagaaccgggaacgtccggaggcagcggaggtcgggcctgcgggttaggtctaccggcggaggaggcagggttcgcccaaaggcccatcccgctggcagtcgctggccgacggcgtgcgcgaggccggtttggggagttattttctctttctc

SEQ ID NO: 40458 - DNA, 896 bp, Homo sapiens; identical to SEQ ID NO: 24524
  chr6:10417173-10418069
  hyper

SEQ ID NO: 40459 - DNA, 948 bp, Homo sapiens; identical to SEQ ID NO: 29298
  chr6:10418940-10419888
  hyper

SEQ ID NO: 40460 - DNA, 1654 bp, Homo sapiens; identical to SEQ ID NO: 24527
  chr6:106959524-106961178
  binary

SEQ ID NO: 40461 - DNA, 1319 bp, Homo sapiens; identical to SEQ ID NO: 27125
  chr6:108439841-108441160
  hyper

SEQ ID NO: 40462 - DNA, 184 bp, Homo sapiens; identical to SEQ ID NO: 22480
  chr6:111751880-111752064
  hypo

SEQ ID NO: 40463 - DNA, 135 bp, Homo sapiens; identical to SEQ ID NO: 10696
  chr6:111766152-111766287
  hypo

SEQ ID NO: 40464 - DNA, 524 bp, Homo sapiens; identical to SEQ ID NO: 27132
  chr6:130088233-130088757
  hyper

SEQ ID NO: 40465 - DNA, 2245 bp, Homo sapiens
  chr6:133561659-133563904
  binary
cgcagaaggcttagacacgaaatgtcatttcagcaatgtgcctagagaagctctgacgccgccttggaagtaagtcgttgctgcctgacctttgggcgtctgggacggatgcctatacctgcacccagcagcactggaaggggcccaggcccttcgcagcacagcctatccccagaccgcttagtccttcataacatatatctccacggaaaagggtatttcctcccgtcagaaaaagcgccccagtctggtctgggttggtttttatttcacgttgttgcaagtaggcgaagtcccttctgtctcctcccttggggtaagtggaaaggagtccggcagggggcccgcagtggcctgcacaggggaactgggtagcgagagagttccaggcaattccgggggctgccccacagaagcaggtggggatcgacagtggctctccggcccagggaggagagcgcggtcgcgggtccctcccctcagcctggaggctgcagccgctcgagtcggcccgggtgggggcggggtgggggcggcgcggagggcacggagattacggcggcgccacccgggacatccagggccccgaggccctgggcggtccccacgcgagatcgcaaaccatgacaataggcagtcacccgaggtcaaataaaaacggagtgggtcccccgcgcgccgccgccccccgcgtccctggcggcctcccccgaggcccccggcggcctcacgagcccgcagtagccggtggcgacgtcgcccccgccccacctccctgcgcaagtgcgaggctgccggcagcgcggcgcacgctccggccgttcccggcttccgcgcaaaacttccatcctgtccacgtgaagttgtcgctgccttagagagggggaaagagctgcgggaaaagccggggagtgacgactgcggcggctgggcgcgctctctcattttcttttcttctcctttcccccctgtcgcagtccggagttttggctcctctcctttcctcctccccctcggagccggcttctccctccgccccgcttctcccccgcttgtgtacgctatttgttgtggggtggccgaaggggatgtcctgttttcaccagaggcacagcgcgaaggggaaacttcgacactggaaggaacgagaataaatacttaattacggacgcactgaaccgcggctgggacagacacttcgggaacccgaggcggaccgggcgacgaggtgagtgaccccttcttccaacccccgccccagggctcccgggggagcctgagttgagagaacccccaaactttccgggaaagtgcgcgaggctccgccggggacgccgagcgctgggtactgaggacgcgcagctggacggtgcgtgggcgcctgcgtccccggggggcgcttggaggccgggtgccccacgcctgagggcccgggccgctcggaccgcagcggtgctctctgccctagaagacgtccccaagccccaagggtcccttccgagcctgcctgtcccttccggggtcggcgcggagcctgcgcgtaacggagttcatccagcagtccagcgcgcggcttctacctgcaccccgcctccacctggcagaggcgcgagcatcggggtctcccccacatctttcttatgacgtgtattactttctgatgaccccctagatggtccaggcgcgaggatgctgacccagagtccttcggagggtcacaggcgcctgggctttcccggtgccgggtgcgtgtgtactttaaaggctcgcgttctaatctccaggcactgatcgggcttttcaactgcggcgatcccactttaatagtttttatgtggcgtggactgaatgtctcctgcagtttgccagggtcggtgaaattagaggcgccttgtcagagcagtcgcgttcattggctcgagtagcgggtgccatggaaggcttataacttctccaaaggaagggacctggctgggtagagcaggtttttctctccttccaagcctgctgggtctggggaggcagtggaacttgaaatggctcggatttttagcgtggtgaagcgaggtttggaagtagacgtgtgtgtgcttgttttattctgcgccgcacagcaacccgaactttcgtttggtagcacttgaaagagttttctccctttgtttgcgagattctgaacagctcggagcgattagggaatttgcggaccgagtccggtggcagagctggggcgaaagcagagagc

SEQ ID NO: 40466 - DNA, 1787 bp, Homo sapiens
  chr6:137808706-137810493
  hyper
cggagtagacggaagggaggcgagatggtgggaggctgaataaccaggaggagaaaggagtcgccataaaatgcacccgcgccaccctccatgtcccccagtggaattgaggatcttgcttgtggcaaaagtgcgttcttggcaccacagccccgcagctggggaggggggcctcagtacccggcttccgcaattttccaggcgtggaggtgaggggtgcttgcgtgtaaactgtggcaacccccagaatcaggccctggctcctgcactttcggaggtgtctgttgcagaccacgaggaaaagaggggtcttactcaagtcagggccggacagaactccaaaacttacgaggacagctatccaacactgcctcacagacccttaggcgctgccccctctttgcccctgtcctcctgcggtgcgagaaacccgaccactctgcttctacccgaaccccaggacgcaacagtaaaatcaaggcccgtcgttgaactcccaggtctgcgcatccctccctcctggctccctggggtcttggccccagcaggtccagtacccatccccagagggacccactaccctgggcgtcccagggtgccaggcacgatggcctgcaatgggggctgcaatttaaccgaggcgagttaaattccttttgccggtgcctggctgcgaggacaaacgtccgtactttcgttcgggagccacgggcagtccaggggcttgggttagaagcaacggctctcttccaggggctgtgatccgggtcggccagggagagcgaggccccggggtcctctgtgaggtccccagcgaagagacgcagctggggaaggcgccgcccccgggccccctgcgccaccctaaccgggcctctccttagcaaagttgacaaattcttgagagtgtcagcccagggctgcgcgtgagggcgctgggaccggggaggaaagagcacctgccgcgctcagcccgactttgaatttgtttgttgttaccgtttttgtttttcctcccagtttccataaacgcttagtatttcgaggcactttgcaggtgttggcgcaggtgatgatgggcctcgttggactctgcctcccacgcatccttttgttttctgcgcgccagcctgtctgactgtgtcctgcggggaccccgagacagtccggggtcagggcgtagagactcatgcttgccacttgacccatccgcaacccggggaccccctagcccgtcgcggagctggagtttgggcttccggctcccagctctccgccctggatacaggaagagggcgggagaggtcgcgcacccgcgccgctcggcggggatcgctcacaggggctccggggccaccgcgagcgcggactgcggctgctggcgggctccttcgtcgtccaacgcaccccatcctctcccgccccgcagtgtcccagggaaggcttcactgaaaacagacgctcgacggaaaactgactctgcaggcccgagctttcggagtttgatttctgtgggccccttaaacgggcactgggtacaggagaggccccaactctctgcagggacggggagggaagggcactcactctcccgcaagttttcctagaggcgagctgaagatgcaggccacctccctcccgcacggcccctcccttggcctagttctgtccaaagacacttcccagccctcgagcggcggctcctccactcgattcctgcctacacgtgaagagcttggacccagcggggctgcactcgggaggacaggcccagatcctgcacggcc

SEQ ID NO: 40467 - DNA, 1059 bp, Homo sapiens; identical to SEQ ID NO: 30473
  chr6:149068769-149069828
  hyper

SEQ ID NO: 40468 - DNA, 1432 bp, Homo sapiens; identical to SEQ ID NO: 39321
  chr6:150284908-150286340
  hyper

SEQ ID NO: 40469 - DNA, 1189 bp, Homo sapiens
  chr6:157556779-157557968
  hyper
cgcttggaacttgcgagctgatggcttttggtggagcccaggaggggcgctgtggggcacagacgtgtgcggggccggcagctgcggagagagcagcgcaccccagccttcaattccccgccgaagatgggactctgcccagagccgaggcccctggctgctgccccgctcccttgcggccgcagtgacactcagagccagattcctcagacaatcttcactcctccgtggtggctgccttgggaggcgttgcggggtgaaggaagtcgcagctggtcccaagcagtggggagggcaggacagggagtaagacaccgccttcctggggtgcacacggaggaggggcgctgcccaggagcggaggggaggggagcggagcgcggagaggagaccggtgccagacttcacccgcctagctctcggaacccccgggggccgcgctcggctccgcctgggggctaccggttctgggccaggagaagaagtggcatccgcggggcagggcgggcggtgacggccggctcaggtggcggccccaccccagcgcccttcagcaggcctgggtcggtcggcctcggaccccgtaggcgccggcggagctggcggcagggacccgacagctctgccgcggactccgcaggggacatcccccaccctggcggcccacccaggcggagcgcggcggggaccgtgcatctagcgcgccctggtgacctgcgggccgaggcgggctgtggggcttggccccgcgactcagccttccgggcccacagcggccctgacccgggaagtgcggaggtttggccgccttcaacagcacctgccaggccactgggagcagcgggggagaagtgggctcgcacaccgacggcctcccgggttcggcggggacgacccgagctaggagcccgcgggggccgtgggagctgctccgccgaggtggacccggggcgcccgcacccctcaccttctttccgtggggtccggggccagggacgcagcgggggacggcgggcatcagccgggcagcgcccgagccgtccctggccgggtccccacacctgcgtgctcgggcatccccagggtcgggggcgcggtgaatcgtggtccccgcagcccggggcccgccaggcccgcggagtcagcccaccctggcgaggggcccaggcacccgcatttaaccagtccc

SEQ ID NO: 40470 - DNA, 56 bp, Homo sapiens; identical to SEQ ID NO: 7457
  chr6:158321417-158321473
  hypo

SEQ ID NO: 40471 - DNA, 520 bp, Homo sapiens; identical to SEQ ID NO: 8616
  chr6:158402113-158402633
  binary

SEQ ID NO: 40472 - DNA, 773 bp, Homo sapiens; identical to SEQ ID NO: 28111
  chr6:1624983-1625756
  hyper

SEQ ID NO: 40473 - DNA, 1797 bp, Homo sapiens; identical to SEQ ID NO: 22490
  chr6:167314272-167316069
  hypo

SEQ ID NO: 40474 - DNA, 557 bp, Homo sapiens; identical to SEQ ID NO: 29309
  chr6:167764611-167765168
  hyper

SEQ ID NO: 40475 - DNA, 460 bp, Homo sapiens; identical to SEQ ID NO: 33874
  chr6:167836474-167836934
  hypo

SEQ ID NO: 40476 - DNA, 1038 bp, Homo sapiens
  chr6:170474572-170475610
  hypo
cgcccgccatcctcctgcattagcatactcctaattgattaagtggatgattgattattggacccgtgcggtctgctttccagacccgttggctgggaatggaaagccacgctcggccctcggatgcagcagaagccccctgccccgtccgctccaggctgcagagccgaggtgattggcgccaggctgcccaccccgcctgccccagcaagtgcgtcgcgcccccatggtttctgctgtttgcatgtcaggtcccggcaggaagctgcagtccgacgttgctcagcgtccagcaaggggctgcccagatcccgtcttccacagaccccctctgaggccctcgttccctcaaaccccaggagccagctctgcccccgcacagctccacggccccaggctgcttcccgctactgtaacagacgaccacaggtcgcataggccagagcccggcacggcttcttgggtgacaatcgaggggtcctgacccagcacccgtgggcacacccttatttggaaattgggcctagcccggagtgatcatgaggccacgtgacatgggcgtgccagtctcaccaacgtgtgttttcacgggcaccacagagtctgttttctatgggtggggcagcggtgaacatatccctcttaatagcggtacgggtacggccagggaggcggcagaacgtagacagaacccgggcactgagagaccggtgccgccccccgccgtccacacaacccgggcctcgggcagcaccagcaggacttttattcctcaccccgcacgccgccgtccatctcctaggccagcgtgattcttctgagtgcagctgggtctcctcctgggagatccggtggctctagcagcgtgggtgctgggaacaggaccagcctcgccggcggacagtgtggacgcctgagggcaaaccctggaccactctctccccgggggactccgttcccgcctccagggagctgcgaacgctccttctgggacacctgttggcaagaaaccagttcaatcgtctcacttccagaaac

SEQ ID NO: 40477 - DNA, 163 bp, Homo sapiens; identical to SEQ ID NO: 22495
  chr6:170531590-170531753
  hypo

SEQ ID NO: 40478 - DNA, 301 bp, Homo sapiens; identical to SEQ ID NO: 33877
  chr6:1708438-1708739
  hypo

SEQ ID NO: 40479 - DNA, 162 bp, Homo sapiens; identical to SEQ ID NO: 14144
  chr6:21202340-21202502
  hypo

SEQ ID NO: 40480 - DNA, 194 bp, Homo sapiens; identical to SEQ ID NO: 25781
  chr6:24494664-24494858
  hyper

SEQ ID NO: 40481 - DNA, 747 bp, Homo sapiens; identical to SEQ ID NO: 32058
  chr6:26240648-26241395
  binary

SEQ ID NO: 40482 - DNA, 730 bp, Homo sapiens; identical to SEQ ID NO: 23325
  chr6:26577146-26577876
  hyper

SEQ ID NO: 40483 - DNA, 695 bp, Homo sapiens; identical to SEQ ID NO: 25784
  chr6:27064607-27065302
  hyper

SEQ ID NO: 40484 - DNA, 629 bp, Homo sapiens; identical to SEQ ID NO: 23328
  chr6:27463044-27463673
  hyper

SEQ ID NO: 40485 - DNA, 496 bp, Homo sapiens; identical to SEQ ID NO: 24557
  chr6:27832868-27833364
  hyper

SEQ ID NO: 40486 - DNA, 1121 bp, Homo sapiens; identical to SEQ ID NO: 25787
  chr6:28175204-28176325
  hyper

SEQ ID NO: 40487 - DNA, 827 bp, Homo sapiens; identical to SEQ ID NO: 29328
  chr6:28303261-28304088
  hyper

SEQ ID NO: 40488 - DNA, 795 bp, Homo sapiens; identical to SEQ ID NO: 23336
  chr6:28367069-28367864
  hyper

SEQ ID NO: 40489 - DNA, 575 bp, Homo sapiens; identical to SEQ ID NO: 23337
  chr6:28410904-28411479
  hyper

SEQ ID NO: 40490 - DNA, 647 bp, Homo sapiens; identical to SEQ ID NO: 25791
  chr6:3285154-3285801
  hypo

SEQ ID NO: 40491 - DNA, 152 bp, Homo sapiens
  chr6:34518788-34518940
  hypo
cgggccctcccagctggggcagccagcattattcccacttgacggacaagggcgctgtgacctgctacggggcacctgtccatgcgtgagtgagcagggactcgaactcaagactcggctccaccctcctttctgctggtgctggcagaccc

SEQ ID NO: 40492 - DNA, 2706 bp, Homo sapiens; identical to SEQ ID NO: 22934
  chr6:391113-393819
  binary

SEQ ID NO: 40493 - DNA, 118 bp, Homo sapiens; identical to SEQ ID NO: 24572
  chr6:42762779-42762897
  hypo

SEQ ID NO: 40494 - DNA, 210 bp, Homo sapiens; identical to SEQ ID NO: 28126
  chr6:42813329-42813539
  hypo

SEQ ID NO: 40495 - DNA, 412 bp, Homo sapiens; identical to SEQ ID NO: 29348
  chr6:50817038-50817450
  hyper

SEQ ID NO: 40496 - DNA, 198 bp, Homo sapiens; identical to SEQ ID NO: 18880
  chr6:52141070-52141268
  hypo

SEQ ID NO: 40497 - DNA, 583 bp, Homo sapiens
  chr6:5851329-5851912
  hyper
cgggggacattcctctgctgaccccaaagttcagcaggtgcgggagagggaggggcggactcttctgtctgcacagggcttggggaggcatctcctcctcggggctcgcagacagggcttctcgtgccaacgctgcacctcggggcgtgttctcccacccatctgtgctcaggcatcccttccctctcctctggattttgtttaggcctatttgcaatttcttaaaaaaaaaaaaaaatctaataaatagttggagcctgaaagagagctggccaatgaaacgccgcgttggggcattaccgcatcggtgaggccgcccattggctggcgtgccctgaggcgatggctgcgtttccccggcaccgccccgcgccggtgcccacgcgtcccgggcttcaggggagcacctgggaagcgctgggggtcgcgtgcccttggccggaggcctggtcacccgcaggccctgccatcctcggcttggccgctgctgcccgcgcgcctgtggcggagcgagcctgcctccagggcagcctcaccgcctggatcctgggcaggagacctcccaggtaataaccgtgatcac

SEQ ID NO: 40498 - DNA, 1129 bp, Homo sapiens; identical to SEQ ID NO: 33889
  chr6:70991978-70993107
  hyper

SEQ ID NO: 40499 - DNA, 830 bp, Homo sapiens
  chr6:71666301-71667131
  hyper
cgtggaggagcggcaggttcgcgcaagctagagcgacaaggggtgcaggcgggcgggcaggggctgcccccgactccaggtgagctggcgggaagcgggactcggtccagccgcgcgccgccggtcccggagttgtgccgagtgcgggaaaggcgctgatccccaccgcgctctttctgaagagtggaagccgagaagcggcacccggtgcgcctcgccgctccagtccggcggtgctgcgggcacaagggctccagccgcgggcccccaggacgctctctgggacgccttcgagggcgggcggcggcgctgggggctttccttcctcacattcccgccggggtggcgaggagcgggtggagacgctgggggttgtgtcccggctgtgttcgcgcgccgcagcggaagcctgctctcagtcccttgctcttgtcttctcagaacctctccggatccagcagcaagatcccaaagcaaggaaagaaagaaaaagcgagggggcgggggcgctgcagaatccagcgtcctcccaagtcctcctgtgggaagacagcagcgctgctactggtggagaggggctgcgagagggaggcgcggagggaccccttggctctccgccgggtctggcgctaacggccccgcgagcaagctcgggaggcggccgctgcaccgcgggtggaggagcgggaggagcgtccccgcggggctgcacgacctcctggagggggtgatgctcgttcacctctcttcagctttgtgaaataccgcaaggtctttggagatgagccaggaaaatccattcacgtgcggaaatttgccgggctacgcgc

SEQ ID NO: 40500 - DNA, 2473 bp, Homo sapiens; identical to SEQ ID NO: 28135
  chr6:73330635-73333108
  binary

SEQ ID NO: 40501 - DNA, 481 bp, Homo sapiens
  chr6:73972647-73973128
  binary
cggactaaccgagttcgagaccacaggggggtcaggtagccaaggctgggctttgacggtaggaatgaaggaggtgagggtggcgcgccgcaggcctgggccactccctgagtagggcggcggcggcggcggcggcggcggcggcagcggcggcagcggctgcaggcctggccgattgtgaggagacagcggtacctcctgggccgcgcacccgacccttccaggggtcccggctcgcgccgcggccgcgcgaggcgcgctcgagcggaagtggcggcgaccccgccggaagcgcgcggctgcggcgcgggaagcaacccagagccctcctcccgcctgctctgtgtaggagacagcctgcggagcccactgccggcgcgcagagagcccagcagctcttgagtccaggaagcaagggtgggaggagggacgagccagtggcaatgacccagacccggacgacccccattgctgagccagc

SEQ ID NO: 40502 - DNA, 823 bp, Homo sapiens; identical to SEQ ID NO: 24580
  chr6:74019373-74020196
  binary

SEQ ID NO: 40503 - DNA, 806 bp, Homo sapiens; identical to SEQ ID NO: 28139
  chr6:80656537-80657343
  binary

SEQ ID NO: 40504 - DNA, 1301 bp, Homo sapiens; identical to SEQ ID NO: 37764
  chr6:88876226-88877527
  binary

SEQ ID NO: 40505 - DNA, 129 bp, Homo sapiens; identical to SEQ ID NO: 22517
  chr6:89554102-89554231
  hypo

SEQ ID NO: 40506 - DNA, 809 bp, Homo sapiens
  chr6:90121688-90122497
  hyper
cggcttccccagcacctggctcatcgtgcccaccggccggccggcccggggacggcgggggtcccggggtgggggccaagcctcctagccggccgcccgcagcctatttctgaagcggaggtttgtctagagctcagcggggcccggcggaagcgggggccgcgcgtcccccggcgggcggcgcccaggtccgggtcccgcggttcccagcgcgcccgaagccccctcccccgccccgcccgccggcggaggagtcagccggagcgcggcagttcctcccggaggagggagagagagagagactgcgtgacccgagtcacctgacacacactgtcacatactcacatacacaccccgcacgggcgcgcgcgcgctcgcccggccgcgggcaccactcggcggggcgctgggccgaggacacacatgcacacgcacacgcacacgcacgaggagaccggggaggcgcggggcccctgcaccctcccagactcacaccgacacacgccccgtacacggggcccccgggacgccggccgtcacccaccgcggctgcgcgccaggggcccccacgcgcctctccttcacgtggtccccgcacaggcaggggagggggcgccgcacaccctcaatgtcccccccgccgtcccactcccacacgcccgcagagcgtctaccgtgggcggatgcctcctgcttacagtcctgagctagggtcccaagcgggtggcctcccaacactgtggcgcccagatcccccaccccagagcagcgtgcccaggacaccctgtggacgctcaagagccccaggc

SEQ ID NO: 40507 - DNA, 236 bp, Homo sapiens; identical to SEQ ID NO: 16049
  chr7:100064586-100064822
  hypo

SEQ ID NO: 40508 - DNA, 333 bp, Homo sapiens; identical to SEQ ID NO: 16050
  chr7:1001822-1002155
  binary

SEQ ID NO: 40509 - DNA, 632 bp, Homo sapiens
  chr7:100318106-100318738
  hyper
cgctccgccagtcccaagggtgcgcaaccggctgcactcccctcccgcgacccagggcccgggagcagcccccatgacccacacgcacgtctgcagcagccccgctcacgccccggcgagcctcaacccaggcgtcctgcccctgctctgaccccgggtggcccctacccctggcgacccctcacgcacacagcctctcccccacccccacccgcgcacgcacacatgcagataacagccccgacccccggccagagccgcagagtccctgggccaccccggccgctcgctgcgctgcgccgcaccgcgctgtcctcccggagccggaccggggccaccgcgcccgctctgctccgacaccgcgccccctggacagccgccctctcctccaggcccgtggggctggccctgcaccgccgagcttcccgggatgagggcccccggtgtggtcacccggcgcgccccaggtcgctgagggaccccggccaggcgcggagatgggggtgcacggtgagtactcgcgggctgggcgctcccgcccgcccgggtccctgtttgagcggggatttagcgccccggctattggccaggaggtggctgggttcaaggaccggcgacttgtcaaggacccc

SEQ ID NO: 40510 - DNA, 119 bp, Homo sapiens
  chr7:100913041-100913160
  hypo
cggcaggtggcaaggcgccacgcctgagtggggatggcgagattgttctccaatcgccaacctcaatggtgcaacgggagacggacatgggaaggctatgacgtcacgggccctgtgac

SEQ ID NO: 40511 - DNA, 132 bp, Homo sapiens; identical to SEQ ID NO: 18892
  chr7:101536683-101536815
  hypo

SEQ ID NO: 40512 - DNA, 468 bp, Homo sapiens; identical to SEQ ID NO: 28146
  chr7:101627660-101628128
  hypo

SEQ ID NO: 40513 - DNA, 415 bp, Homo sapiens; identical to SEQ ID NO: 29359
  chr7:1029909-1030324
  hypo

SEQ ID NO: 40514 - DNA, 740 bp, Homo sapiens; identical to SEQ ID NO: 27189
  chr7:103969373-103970113
  hyper

SEQ ID NO: 40515 - DNA, 313 bp, Homo sapiens; identical to SEQ ID NO: 28149
  chr7:105279344-105279657
  hypo

SEQ ID NO: 40516 - DNA, 260 bp, Homo sapiens; identical to SEQ ID NO: 30516
  chr7:106622687-106622947
  hypo

SEQ ID NO: 40517 - DNA, 832 bp, Homo sapiens; identical to SEQ ID NO: 35025
  chr7:113726962-113727794
  binary

SEQ ID NO: 40518 - DNA, 938 bp, Homo sapiens
  chr7:116962864-116963802
  binary
cggccgcgggggaacgcagccaggaagggtctatgtggccaatgcggtccccattccgatctccaaaatcccccgcgcccgtgcgcgtggacttaccaccatgaagagttgacctcgggggtgagccaggtcaagagcagagggagccagagccagattccaccgagaggggcgttcatattaacccccttgcgtctgcatcaggtcagactccgtgtgcgggcgccatgcgtgcccagagcagaagcgctcagctccgggagcgcctcgtcacggccgccggcgcctcgccgcgcccccgccccccgctcgcgtctgcgacgagtggcgagactcgctgataaagtttcaaacgatgggcccagcgagcgataaaggccagcccggaccgcctcgcccacagcccaattccccaggcgcagcgagcgcctgcagcccgaaagctctgcgcgcctcccgcgcgccccgtccgctctgctcccctccgggcgcagccgagggagggggtgctgcgcctggcgggggtggggagaaacgcggggttttagacacgggtgcatgaaatgatggcaagagatgtctggggatgaggtgaggcggggaagggggaacatcgctgcatggttacgagcacacgcgaatacaggaacctttagggaagctccaggccaaagagcatccgtgggctctcggagcgtgcgttccggattgccgaggccatccgctggcaaacaagtccctgagcgtgcaatgtgaggaaacgaggaagggggccaggggataaggagattactatgcatgggatacaagaatccagagatgattctcaactcattgcttcgcttctctccctgaagctgggatgaagagctagcacttgtaaatttggagctgccgcgtctatgcagggcaaggttagggaggggccaggcctctgc

SEQ ID NO: 40519 - DNA, 847 bp, Homo sapiens; identical to SEQ ID NO: 23347
  chr7:117119463-117120310
  hyper

SEQ ID NO: 40520 - DNA, 975 bp, Homo sapiens; identical to SEQ ID NO: 36863
  chr7:120969785-120970760
  hyper

SEQ ID NO: 40521 - DNA, 1802 bp, Homo sapiens
  chr7:126891155-126892957
  binary
cggggtgggacttgcttaggggacttaagggtttctgcaaccggcgagggggtctgttttcacccccgctatcttgggtgcgcagacactctctgacaccaggcttcacagtttgggccacgggggaagtaattccccagggaaccgcgggggtgcggttttgcgcaactgggtgactcgcgtgtccctccgcatttcatttgcaccaagggagcgcgtgtcagacgaagggaatttttttttcttttttggtgattctgttattttttcaccaactgtacgaagctcaagggatatccgagctttctggctgggcggatgggcttcgcgcttggcatggctgagcggtccatctctacctctccgtttctatctctaccataacagcgaccactcagcccgccaggagcccctgtttcccagcgcaggttcctttttcttctcagttccttgggctgttgaagccgggttctgggtagatagagactggggccgtggggagagcgccaggctgcttttgcctttcccgcgccccggggcattccggcgcgctggggatgcagcctccgcccccgccgcacctggccgcccgagcgcccgcgcccacgccccgcgcggggccgcccgaaactggggccgcgccagccgcgggagctaccgaggagctgttggggtgcgtttgcctttgctttttaaacaagatccccgagaccttttctccatccccccaacccccagcaggacacggaactccggcgtttctcgaaagccacaaaagaggggcacggaaatcccaagctcgccgtgctaactcggagaacgcaaactcgaggcagagcgtgcgccgtgcggggatgtgggtgtcgaggaccccgaagcgcccggcttcccccgcgacccccatcctccctagatcctggttagacatccatccagcccacgctcagagggcgggggttaccccgactcatcccggaagccgctaacttcagaaatccctcctgttaggttcgcgaaacgaaggtacctcgtcatctcggcggggcaagtccggattccaccagggcaggtccgggaggtcacccagggcagacgatccgaggcagagcgctttaaaatcctgccgccgcacgcccagtcagagcgccgagcgcgcctgcccccttcccgtcacccttcagtctcccattcgccgactaaacttttgggggatcacatctccaagccttgggagttccgggtaaagtctccctcttttctgaacctctttactgtaatgtaatcatgggcagacaagaggggtggctgccttgttctttgcaacgtaaaatcaacagacacccaatcaagctccaatgcccggccagcccctcgccccctggtgcccactctccttctccccccattcccgtcacctccgcccgctatttctctcacagactacggacatgcagggccatctacttgtgctcaggaaaaacaaatcactagagtgatatgagaaggaatggtgcacctggctgtccgctgaaaggttttagagaagaaaacggaaaggggaataaaacggggggattctccttttccaacaagcagggcgttttggggaagtttgggggccaggggctttttgtcccgtggttcggcacttgctttcctcggagccgctttctgctgccgggcggcgagtcttaccctgctccccgcagagggcgcggtgaggaagcccgccgggggcccgcagctccatgtcagcgccgccgccgccgccgccgccgccgcgtgaggcgagcacagcggcc

SEQ ID NO: 40522 - DNA, 117 bp, Homo sapiens; identical to SEQ ID NO: 25830
  chr7:128337420-128337537
  hyper

SEQ ID NO: 40523 - DNA, 287 bp, Homo sapiens; identical to SEQ ID NO: 25831
  chr7:128337620-128337907
  hyper

SEQ ID NO: 40524 - DNA, 982 bp, Homo sapiens; identical to SEQ ID NO: 27202
  chr7:129424670-129425652
  hyper

SEQ ID NO: 40525 - DNA, 204 bp, Homo sapiens
  chr7:1303350-1303554
  hypo
cgattaccccgctccccgcctgggaacatgtggcctggcatatgtggggccaacctcagcagaaatccacgtgcacctccgcaggcagcgcgtcccccgcacacccgctgcccgcccggctttcactccagaatggcgctgcccgtgcctgtacagacagctggcaaagcgtcagatggcattacaatatttttacttataatc

SEQ ID NO: 40526 - DNA, 357 bp, Homo sapiens; identical to SEQ ID NO: 24586
  chr7:1308164-1308521
  hypo

SEQ ID NO: 40527 - DNA, 268 bp, Homo sapiens; identical to SEQ ID NO: 24587
  chr7:1315705-1315973
  hypo

SEQ ID NO: 40528 - DNA, 263 bp, Homo sapiens; identical to SEQ ID NO: 28158
  chr7:1333595-1333858
  hypo

SEQ ID NO: 40529 - DNA, 798 bp, Homo sapiens
  chr7:134143320-134144118
  binary
cgctcccacaccttgccgacggctccacgtccctgtctgcgcccgaggtccaccggtctgtgaagcccactttccccgcctccctctcgcgttgtgccgcttggggcgcccgctaggacccaaaatgcggactggtgggccgcccatcaagggttgcccgcggtagggcgggggctcccgtgagctgctcccaaaccccactcgcaggatgctgccctgacgcccagggccaacccggggagccaaggcccccggtctctgcaaggccgaccccagcccgctggggaccctgcaagcccgcgcgtggctcccagcacgccgggcgtccgcggggcgagctgctcagggtcactcggggtccctcgccaatacaggccgcgcggagagtgtgaggcgagccccgggcccgcgcccccacgagcacctaccttccaggtacccaaccccaggatgggcatcttggcgccgttgttgagcaggagacggcttgccatggctgctgcgctccccagacccccgcccagtacggtgcggccttggccgcggcgcgtacctttaaatagcccgtgaggtcggcagaaagggcgcctgcggttggcgcgccgctgcgcgaaggagccttctgattggttgcgctgggggtgccgcggcggccttccccaagggtcggcggggatgcttcttccgcctggtcctagtggcagcggattctttccgcccccaacgctcgcccgcgccccgcgtggcagaaaggagttcctcagctgctgtatctggtgggaaagcgaatgctttagc

SEQ ID NO: 40530 - DNA, 165 bp, Homo sapiens; identical to SEQ ID NO: 22534
  chr7:135611103-135611268
  hypo

SEQ ID NO: 40531 - DNA, 913 bp, Homo sapiens
  chr7:1370055-1370968
  hypo
cgtgatggctcaggtgcgtcttccacgcagatcactctggcagggagcgcggatggagacccgaggctggggcctgctggctttgcccctctacgcgaacagaatggcctctgccctgcaggaatcttgagtccaggagaggagagtttccctggaggtggaggtcaggcccggcagtcagcaggccaagctccttcgggccagggcaagccggagggcttcccagagcgggcacagtggacagctgagcaggccagactctgacatgaggtctggacaggcccttccgcccttccggatgccagtccccctgcttgtctgaccactggcccgcctgcccacggggcggctgagatgctggcgtgtgcgtgcgcatgtgcacgtgtgtttgtgtgcgcgtggggctttctgacagccgataattcacaggcgcctccagagccggctcccgctcccacccgctcactcctgtttatgaagcgaagggtaagtgtttaattagtcgcctaattgcctgggtaattggagacgaactcagctctccaagtaatcagtcggaacagcctcgaaaatatctggcccaatattcattagtgtggcttgatcgttaaacagttaccgtgtttggttcatgacaaggcccagcaaacagctgcgcgcccaacagcccccgccagccctggcagacaaacagctccacgcagacggacggacagccggccagcaccggggcagagatgtgagcggccagcggggcacagacgcgggcggccagcggcacccgcacgttccgtctgtgccctgtccggctgccctttcccctgggccccccggtctccctggagctgcagaggctccctcggtcagttgggccacccccaccccgccagcctcctttgcccccagggagccc

SEQ ID NO: 40532 - DNA, 241 bp, Homo sapiens; identical to SEQ ID NO: 22536
  chr7:139690720-139690961
  hypo

SEQ ID NO: 40533 - DNA, 171 bp, Homo sapiens; identical to SEQ ID NO: 28160
  chr7:140156493-140156664
  hypo

SEQ ID NO: 40534 - DNA, 316 bp, Homo sapiens; identical to SEQ ID NO: 24590
  chr7:1460672-1460988
  hypo

SEQ ID NO: 40535 - DNA, 98 bp, Homo sapiens; identical to SEQ ID NO: 22539
  chr7:148907697-148907795
  hypo

SEQ ID NO: 40536 - DNA, 908 bp, Homo sapiens; identical to SEQ ID NO: 36870
  chr7:149119398-149120306
  hyper

SEQ ID NO: 40537 - DNA, 117 bp, Homo sapiens; identical to SEQ ID NO: 22543
  chr7:150006604-150006721
  hypo

SEQ ID NO: 40538 - DNA, 112 bp, Homo sapiens; identical to SEQ ID NO: 16059
  chr7:150006790-150006902
  hypo

SEQ ID NO: 40539 - DNA, 313 bp, Homo sapiens; identical to SEQ ID NO: 22545
  chr7:152273159-152273472
  hypo

SEQ ID NO: 40540 - DNA, 54 bp, Homo sapiens; identical to SEQ ID NO: 25851
  chr7:152371372-152371426
  hypo

SEQ ID NO: 40541 - DNA, 1474 bp, Homo sapiens
  chr7:155164423-155165897
  hyper
cgtgacccgctccatcccctctttccctgttgcaaggcgagcggaccgcgctgcacgggtccaggctgggtgcccctctcccctggggtaaagaggcagcacaggttgggacagctagatgggggcaatccaggcgtcctgcccacggtttcctgggagccaacaaaggcgccgagacctcacccgtgtgaggcaaccgccccgtggtcccacagagcttctggaagtctgcgtcccggccttcccgatgcaaggcgccctctccacctgcctcggccgtgagcaggttcaggagggcgagaaaggttaggccgagcggaaccgcgcggccagcgttacgcagggtgccctggacacccctaggcgcccacctggacttgttcccacctcctctcgccccttgccttcttaacccgcattacccgtgtaggcctggggtggaatcggactacttgttcgggatttgctcgagaacattctagggagaaggcacgcccggctttgggcttggccgagagtttagggcaggagcgccggcggggagctccccgggtgctggagaatgcgtgtccggaaagaagtagggcgcgcttcgtggatgcaaccagggccgtctcgcgcactttcttcctaccctgggacagcgcctgaactggagctgggcgcacacactttacggagccagctcgggttcttacgccctggctcacccccgcccgccgccccaggatgcaggtgctgcggcgctccctggtagcctcccgcgctccctgggggcgcgctttcctccatttcagggaagtccccggacaggtgcccacgttttacgctgtccggtagaagcccgcgggctcaggccgacttgcgcggccgcttctccccagggagagaagctggagcttcccccacgcggccctaaggcggggccggctgggccggagtgggcgcggccagggtgtcccagcgcgccccctgccgaccgcgcgctgcggggggcaactccacctcccctggggaggcctcgtccccgctgcagggagactaaagcgtgggtccgcgaccagccggtttaggaacgaaaactctggaactaaaaacaaaaaataaaactggtgagtgcgcagcgtggtcagtgtttccctctgggtaatgcttggccaagggggaagatcgagtactcccgcccacatccgcctcccccaggagggaggattccctctctgctcacccaccctgacccacgcctcccgccaggtccactgctcagacaaatctgtaggtttctgagtatccgtatctcgaaaagcttcaatgcacaaacgaggttttaagcccatcgcggcttcgcaaggggaaggggctgcttccctaaaaacaaaacacaacaaaaaaggcaagggggtactcttgcagatggactggaattagtaatttagccagggtctcttccaaactcactgcaaaattcgccagc

SEQ ID NO: 40542 - DNA, 777 bp, Homo sapiens; identical to SEQ ID NO: 23633
  chr7:155581242-155582019
  hypo

SEQ ID NO: 40543 - DNA, 1047 bp, Homo sapiens; identical to SEQ ID NO: 24603
  chr7:156432933-156433980
  hyper

SEQ ID NO: 40544 - DNA, 1331 bp, Homo sapiens; identical to SEQ ID NO: 32154
  chr7:156798275-156799606
  hyper

SEQ ID NO: 40545 - DNA, 695 bp, Homo sapiens; identical to SEQ ID NO: 33909
  chr7:156832501-156833196
  hypo

SEQ ID NO: 40546 - DNA, 226 bp, Homo sapiens; identical to SEQ ID NO: 24607
  chr7:157129089-157129315
  binary

SEQ ID NO: 40547 - DNA, 139 bp, Homo sapiens
  chr7:157276277-157276416
  hypo
cggacacccacttgggaacctcacggttcagatccagggacctgctccccgggagtccagcgtccttgcaggggcctgcgatgccttgtgcggcctgggccgtgctgcttggcgtctgcacgcaatggcgagggctccc

SEQ ID NO: 40548 - DNA, 777 bp, Homo sapiens; identical to SEQ ID NO: 23635
  chr7:157890840-157891617
  hypo

SEQ ID NO: 40549 - DNA, 284 bp, Homo sapiens
  chr7:158550070-158550354
  hypo
cgacgctcgcctctcttttaagtagccacacccaaagtttccctcgtagatgcccttagggcagtggagccaggggagaaagcagagaacggtggattgtggtcaatgagagcaccaggagcaccacagacagtgagaggcagagccaaaggatcccagagctcgcgggacgccccttaatccagcgccaaaggatcccagagctcgcgggacgccccttaatccagagccaaaggatcctagagcccgcgggacgccccttaatcccgcgccaggcaccccgc

SEQ ID NO: 40550 - DNA, 714 bp, Homo sapiens; identical to SEQ ID NO: 24612
  chr7:1641685-1642399
  hypo

SEQ ID NO: 40551 - DNA, 505 bp, Homo sapiens; identical to SEQ ID NO: 35991
  chr7:17339346-17339851
  hyper

SEQ ID NO: 40552 - DNA, 253 bp, Homo sapiens; identical to SEQ ID NO: 16079
  chr7:2071776-2072029
  hypo

SEQ ID NO: 40553 - DNA, 540 bp, Homo sapiens; identical to SEQ ID NO: 30580
  chr7:23287221-23287761
  hyper

SEQ ID NO: 40554 - DNA, 152 bp, Homo sapiens
  chr7:23719548-23719700
  hyper
cgccggtccagggaagggagaggggaataggtgcaaggtttgtggagggcggcaaactgcactccatgtggcgcgaggctgcgcttgcggagatccgggttctggtgcctggcgccggcagccagtaggggcgcgcgtcctgcgcagttgcc

SEQ ID NO: 40555 - DNA, 867 bp, Homo sapiens; identical to SEQ ID NO: 37809
  chr7:27135176-27136043
  binary

SEQ ID NO: 40556 - DNA, 868 bp, Homo sapiens
  chr7:27136064-27136932
  binary
cgccgggtggccgcaagtacgccggcccagcccgcagcgcgcccagccggaaggcggggaatccggctgacaccgcgccccgggttcccaggccacctcctctgttctgaggctgggctgggagaccgtggggctgtgaggagcgcatagaaccgtggtggagggcgaggctgggccaccggctcttcaagctcggaatggagggggaagagcgcagagggctggctgggaggaactcgggtgggcgtgaaggagacgagggcaagaaaagaaacttcccttcttccaggagggtcttcgaaaccctctccccacagcccctctcgtcattagcatggcaatgaggagtttctgtaattcgacttggaggggcggatgagccctggaaactcagagctcgccggaaaaggccgggggcggccgggctcttcttccccaccttccctctctcgtcgctctccgcccctttctctttcccactcagttttgcaccgggagccctccgggatgcggagctactcgaccgccggatttttaggggtaggaggcgggggagagagatgacgctggcggacgtggccagcgcgggggccgggcggtgcgctgcaggccatctgccggcgccctgagacccaggagcctccgcgctcccgcgtgggcctcacagggccggtccacagctccaacatagtagctgaactcccttcgttgcgttcctctttttctggaggggaatgttagaagagagagagagcttccttttataaccttcctcattctgctgcacgtctagagtgggtgtgggggctggcaggtgggaggggcggtggacaaatggctgatggtggacgggacactttaccccaac

SEQ ID NO: 40557 - DNA, 497 bp, Homo sapiens; identical to SEQ ID NO: 25878
  chr7:27531212-27531709
  hypo

SEQ ID NO: 40558 - DNA, 88 bp, Homo sapiens; identical to SEQ ID NO: 9928
  chr7:27651058-27651146
  hypo

SEQ ID NO: 40559 - DNA, 1068 bp, Homo sapiens; identical to SEQ ID NO: 24635
  chr7:287728-288796
  hypo

SEQ ID NO: 40560 - DNA, 62 bp, Homo sapiens; identical to SEQ ID NO: 16086
  chr7:29390389-29390451
  hypo

SEQ ID NO: 40561 - DNA, 955 bp, Homo sapiens; identical to SEQ ID NO: 22944
  chr7:3082731-3083686
  binary

SEQ ID NO: 40562 - DNA, 897 bp, Homo sapiens
  chr7:32337777-32338674
  binary
cgtccgcctctatctctggggcctaggtgtttctatcagtgtccccgtgtctggatgttcctgccgctctgtctgtgtgtctctatcatgtccacatcttcctgtcgctttctgtctccctctctcggcactatcttcatctctccatcgcagcgtctccagccctatttccacccctcctttcccccggcctgccttattaaaatcgcagccaggaaaccgagcagttcggggaggtgtgatgctgaaaaccagcttccgcgcgacgccgggtcggagcccgcgaggggtgccgggggggacagcccagggtgcggcttctgtcccgacccagtcgccgctcccgggggctcccgcccggagagcaccctccggccccagcccgacccctgagctccccctgcccgcttagaaaggaactctgaccgccaccggagagggcgtttgcccgagccaggagtccgagaggggtggaaagttctcacctatggtgaagctgtagccatcgatgctgaaagtggcgctccggcattttttgaagccctccttcctgttgccggcgtccgtcatggctcggccggccgggcaggggcctcgcagcgagaccagcggcgtctgcggtcccccccacggcggagtgagcagcccggggctcggcggcgaatcctcccccggccgcgccgcgctgtcactctcagccccgccgcgcgctggcagctgagcgcctggagacaacagcggggacccaatgtcaacagctaaagcgctaggagctcggcggaggcaggagccgtcgcgactgccccatctccaagccgagttccagaggcggcgagaggagtgtcaggaagggaggacgcgcgcccgagcgcgtggacggggctgaccggtgggcgc

SEQ ID NO: 40563 - DNA, 505 bp, Homo sapiens; identical to SEQ ID NO: 33930
  chr7:345250-345755
  hypo

SEQ ID NO: 40564 - DNA, 961 bp, Homo sapiens
  chr7:35225753-35226714
  binary
cgcagccgttgactagccgttgacgagcggacctcccggtcgtcatggcgactgtgaaatgtagggtggagcgcatgcgttcgaagccattcgcgcgggcagtccctgcgtgtccccctgcgtgtccccccacgtgctccccagcgcgcgcagcaccccgcctctgcgcttccccgagcgtgcagcttccggtgagggcagccccacgcacagcccccaacaccctccccagcgcctgcagccttcggtgcgcgcagtccccaagcccacatgcgcagttctcaccttgcgcgcagccccacgtacagcccccaacacgctcccagccccactggcgcagaacccatcaccgcttgcccttcacgcgcttcattgggagtgcagctcccaccccgagcgcgcagctccacgcagcctctccacactctccccagcgcttgcagcaccccccagtgcgcacagctctgccagtagcttcccggcgcgccgcccctgcaccgcttcgggccataaccttgctggcgactaagtctgaagaacttcctgtggtttcattcttttcttcaggtttagtcttagctctgacattttaaccaaaaggttacacgttaattaacgaggtattaaaggggaagatctcagctgaaagaaatgactgtaggaagtgtgtcagggaagccaacggaaccgctggcccgccggtggtgcgcccggcattaggaaagtctctacgatcgctgaggtatcgggcagtcagtgcccgttgccaacgcggagggaacgggcggagactgcgggcaacacgtggcagagccggcgtgagtccggtgggtctgatcccagagcctcaggttgacgccacttccttggcacggaacagcgtttactgaatcttagagcaaaatgcttttccaatgaggttcctcagaagtcatcggccctaggagcggtgtgctcaagc

SEQ ID NO: 40565 - DNA, 254 bp, Homo sapiens; identical to SEQ ID NO: 16089
  chr7:36124398-36124652
  hypo

SEQ ID NO: 40566 - DNA, 835 bp, Homo sapiens; identical to SEQ ID NO: 27242
  chr7:39453515-39454350
  binary

SEQ ID NO: 40567 - DNA, 259 bp, Homo sapiens; identical to SEQ ID NO: 14278
  chr7:42237185-42237444
  hypo

SEQ ID NO: 40568 - DNA, 66 bp, Homo sapiens; identical to SEQ ID NO: 33934
  chr7:44740657-44740723
  hypo

SEQ ID NO: 40569 - DNA, 187 bp, Homo sapiens
  chr7:45299664-45299851
  binary
cgcggtgagacggtgcatgcgcgcgcaatcagatccgggttagcaggatgcatctttgaggtccccaaaccaagccacctgcacggacccaatatctctggcgcgtcccgaacgccgtggattggcgtctgccgccccctgccggcggcgcgctgcactgcagacactgaactcgcccaatgggtgc

SEQ ID NO: 40570 - DNA, 777 bp, Homo sapiens; identical to SEQ ID NO: 33936
  chr7:4856619-4857396
  hypo

SEQ ID NO: 40571 - DNA, 154 bp, Homo sapiens; identical to SEQ ID NO: 32209
  chr7:497757-497911
  hypo

SEQ ID NO: 40572 - DNA, 3045 bp, Homo sapiens
  chr7:49812706-49815751
  binary
cggggagagattggcagagattcagaaagttcgcgcttgagatttttacgtttcttactcgtaaacgtctatttctctgggtttctgaatgcaaagacgagaaagtctcaacagtctgctaaactaacacggccttcgaatcccaatctgaacacagtagctgaaacaagctgtccacaaagaggaaagccagagggggccaattaggaaggaagaaattaaagaaaagagaaaagccaagatgaaaggtccagcgcaaagtgaatgactcgactggagaatggcagccctggcagggtctgcggccggctgcggaggtggggacgcggccgcgcggacgagtgacaggttggtccggcgcagcaaagggagcgggtgcggcggtagggcctctccgggggcagcgcgagggcctcccccggggcagcgcgggccaaggcggggcctccagagcgggggcagcagaggagggagcggaacgggagccgggcggaggcggctgcggcagggggaggcgggaggcgggcgcgctagctcccatgctggcctcggtgccactcgcgcgccggccgcgctccgggcttctcttttccctccgacgcgccacggctgcccagacattccggctgccgggtctggagagctccccgaacccctccgcggagaggagcgaggcggcgccagggtggcccccggggcgcgcttggtctcggagaagcggggacgaggccggaggatgagcgactgagggcgacgcgggcactgacgcgagttggggccgcgactaccggcagctgacagcgcgatgagcgactccccagagacgccctagcccggtgtgcgcgccaggcggagcgcgcaggtggggctgggctgttagtggtccgccccacgcgggtcgccggccggcccaggatgggcgctggcaacccgggcccgcgcccgccgctgctacccctgcgcccgctgcgagcccggcgtccggcccgcgccctgcgctcatgtatgtaggtttggcgccggtcttcagggctgagggtgcatgctgggtgtccccgcgcggccggacgcgctccagctgggttcagccgctcagctgctccggaggaaccccctcccccgcccaagtttgtgaatatgggcgcttcgcccagtgttgaggtcggcagggaccgggcagggggtcagcagggccgggcacgtccggagccctcagggaggagggctgagggggaggggacagacgcaccggagtgcgcagagtgggggcgttcggggagtgaggcggagagaggctggattgccggtgtcctgcggcgtctcgggctctcccagcccctttgggcggcagaaactttggaatccagaaaggctggccgggatccagcgagtaggagggtctcgcgcccactctgcgccctggggccccagcctcccgcactgcacaccttggtgctgcccgggcgcttctgctccgcagccaggacactacaagactgagcgctgcggccggcgacctggctcccaaggctcggaggggcgggccggcagaggagctgaagccccgggaatccccgacccggccctctggcaaggggccgagggcatcctttcatgcagcggggcttagagagcggggagggggcgtctgctcccgagacgggagtcttttaagaagttgttagaaatgaatcgtggagtcctaggagaagctttgtttaacctccccgcattttcccagcacaaccccctaaagcaaatgaggaagagtttccctcttatcttcctgtacattcgtccgtctctaactccactgctgaattctccatttaataaccttcgggaaatgtggccaggacctagggagggacaccctgggtgcctgaattacgtggttcaaggcagagctttgcaggggggcgcgggcctggctcgctgcgttccctgggctccgcaagccgcccttggccatctccaacactaatcacgactacatcagaaacacgccggccggtgtcgttcttggatttcgcttccaatgtatcgctccacagtttgtgatgtctaagaaccccggccgtgcaccgacgctgggcatgctgcccccgcccccgtcgcccagctcgttaatctagagctatgccggagcccgggtgggggccgcggcgggccggggcgcgcgcgggccgcggggctcagttgtgctgctgttctctccgcagggacggcggctcccggctggcggcggcgcgcccccgggctgtgaatgcgactcgcccctcggccgcgctccccgcccgcccgcccgccgggacgtggtaggggatgcccagctccactgcgatggcagttggcgcgctctccagttccctcctggtcacctgctgcctgatggtggctctgtgcagtccgagcatcccgctggagaagctggcccaggcaccagagcagccgggccaggagaagcgtgagcacgcctctcgggacggcccggggcgggtgaacgagctcgggcgcccggcgagggacgagggcggcagcggccgggactggaagagcaagagcggccgtgggctcgccggccgtgagccgtggagcaagctgaagcaggcctgggtctcccagggcgggggcgccaaggccggggatctgcaggtccggccccgcggggacaccccgcaggcggaagccctggccgcagccgcccaggacgcgattggcccggaactcgcgcccacgcccgagccacccgaggagtacgtgtacccggactaccgtggcaagggctgcgtggacgagagcggcttcgtgtacgcgatcggggagaagttcgcgccgggcccctcggcctgcccgtgcctgtgcaccgaggaggggccgctgtgcgcgcagcccgagtgcccgaggctgcacccgcgctgcatccacgtcgacacgagccagtgctgcccgcagtgcaaggagaggaagaactactgcgagttccggggcaagacctatcagactttggaggagttcgtggtaagatgcgaacgcccgccgggc

SEQ ID NO: 40573 - DNA, 545 bp, Homo sapiens; identical to SEQ ID NO: 22576
  chr7:5428491-5429036
  hypo

SEQ ID NO: 40574 - DNA, 145 bp, Homo sapiens; identical to SEQ ID NO: 18028
  chr7:6058662-6058807
  hypo

SEQ ID NO: 40575 - DNA, 473 bp, Homo sapiens; identical to SEQ ID NO: 22578
  chr7:617508-617981
  hypo

SEQ ID NO: 40576 - DNA, 54 bp, Homo sapiens; identical to SEQ ID NO: 22579
  chr7:65562589-65562643
  hypo

SEQ ID NO: 40577 - DNA, 253 bp, Homo sapiens; identical to SEQ ID NO: 25900
  chr7:7605160-7605413
  hypo

SEQ ID NO: 40578 - DNA, 112 bp, Homo sapiens
  chr7:77309585-77309697
  hypo
cgtgagccatcgtgcccggccagacgatagatggattctttttttttttttttttttttgagcaaattgagctacttgagcctcggcctcccaaagtgctgggattactggc

SEQ ID NO: 40579 - DNA, 2290 bp, Homo sapiens
  chr7:79081837-79084127
  binary
cgcccccagcccagccccagaaacgctggacgcagttctccgctcaccccaccaccttctcttcccagacccgctggtgatgccgctgcaccctgaagttgctccttccttctttccctcccttcctcccattctttctttcttttcttccttcctcccttccccaaaagctcttcatccgcttcgggtgatgccactgacgcacattcaatttgccccagcagctctgaggaggtcagaccaggccgagcaccttccaaaggggagggtctaactgagcaaacaaagttgcacgccacaccacaacctgcccctcccctccctttagcccccaagtcgaatccccggcgaaactcacttgcactgcgggtgctctctggcccccaccccatcatcgcgcaacacacccccttcaacatgcgcggccaccctttcattgccctgcgccccgagcggtcccaccgcccggcaaaacactgagcaagccgctgctctcaccttgcttgacacacttgagccggagggggtccttgcagtgtttgatcacggccagcacgtccctgatggtgagccccgccacgggggtctcgttcacctccagcagcagctcctccgacaccaatttgctgccgctctcataggccaccttgccgggcttcacctcccccaggtaggggaactgtccattctcggcgccccccttcagttcaaagcccagctggccctccgggttcctgccaatgacactctcatggactttgctagtccagtggcttttctttttcaagcttttggacatggcagtggggcgagtcgcctcagttcctgggctccttggggttaggggggctggtggtgagagaatgaggatggaggagcaagggggcccagggggaagaacagcagactttgccttcgcccccctctattcggtgctttccctcttctttggatggagtgtggacgaggaatggggaggatgagagggacggctgggcagaggtaggagagcttggatgaggttgtgctgtcccttgaatgacactcaaggctgtggccccgcagcagaggaagcagtggtggtggcgtcggcggcggcggcggcggcagccggagcgagcagtagccgagctggtgagcgggtgtggtgggggtggggaaggagggtagggatgccgggggccactcctgcgtggtgcgagtgggaacgcgcgcgcgcgcctgggtgtgtgttgttagctgatatccatggcagctgcagtggcagggtgcgtgtgcgtgtgtgtgtgtgtgtgtgtgtgtactagttctactgtactggcagacgggaggaggcaggggaggaggggcgcgcgcgccgggtggggagccacggagggcttcgccgctgcctccctccctccctccgcagcttgacccggtagtgaaggcagagagagaggcaggctgggtccgcctggcagcctacgggaggaggcgggagccgggaaggaggggagcctaggcccggcgtggggaggccggcaggaagggcctcgagcccagtgcggacctttcttcagcctctgtgcgaccgagccgcgcgccaggctcctgtgcgaggaggacgcgctgactccctccgacctgggctccgatggagcagaaatagcgggacctggacttgtggcgcgcctggtgccacatctcgggctctgcgagcgtcctggcgcgggatcctgccgtgagaaggagttggggcgggggacccggcggggcattgcgggagaaggcctgggatccctgggagccttgtagcgtgggggagttcactgtgtagagaggtttcatgtcttcatctatatagtcacttatttgtcttaaagttctcgaaattccctcttagagaaggagaaagttagagaactggaggctgcgtaccctgattacgcagaagggaagcagcctcgcattccccggggcaggcccccgcccgcgcgtcccgccagtaggggaatttagcggacggctgcggttgtctggtgaaaggctatccaaggataaggggcttcacttttcccaagtaggggaaagagaaggggtctacagggctaggggtggagggagcggatgcagtgagcagcctccgcagagaaattgacaatttaaccagggacctgcggcagagacaaggcggagacactcccttgcccaggaaagccgccagagtccggcttgtacctggggaagaatccttaagacggtctggcccaacactcctttgctcacagagaaaggggagaagactccc

SEQ ID NO: 40580 - DNA, 245 bp, Homo sapiens; identical to SEQ ID NO: 14304
  chr7:818254-818499
  hypo

SEQ ID NO: 40581 - DNA, 926 bp, Homo sapiens; identical to SEQ ID NO: 25902
  chr7:8483083-8484009
  binary

SEQ ID NO: 40582 - DNA, 1117 bp, Homo sapiens; identical to SEQ ID NO: 23367
  chr7:87229392-87230509
  hyper

SEQ ID NO: 40583 - DNA, 300 bp, Homo sapiens; identical to SEQ ID NO: 29424
  chr7:915072-915372
  hypo

SEQ ID NO: 40584 - DNA, 513 bp, Homo sapiens; identical to SEQ ID NO: 33943
  chr7:95025593-95026106
  hyper

SEQ ID NO: 40585 - DNA, 605 bp, Homo sapiens; identical to SEQ ID NO: 29428
  chr7:96621730-96622335
  hyper

SEQ ID NO: 40586 - DNA, 747 bp, Homo sapiens; identical to SEQ ID NO: 32234
  chr7:97361020-97361767
  hyper

SEQ ID NO: 40587 - DNA, 943 bp, Homo sapiens; identical to SEQ ID NO: 35116
  chr7:99155672-99156615
  binary

SEQ ID NO: 40588 - DNA, 680 bp, Homo sapiens
  chr8:105478740-105479420
  hyper
cgccggggctgcgctccttcccgcccacccagctcctcggcgccgcgccgcgcgaggcggccctgctgaggaccccgggacgactggggaggctgcccgagcctccgtgggtaccgcggggcgggggcgcggcggggcgggtaccttggtgccctggtggaagtcgtcgatggaccgcgagcccatgaaggggaactgcatgtgcgtgtgtgtgtcgatgcctccgggcaggacgagcttgccggcggcgtcgaggacccgcagccccgcaggagcgcccccgggaggcagcaggtcgtgcccgagtgcccgcaccacgccgtcctccaccagcacgtcggccacctccgagaagtcatcgttgaccacgcgacccccgcggatcaggagccgcgagggcgccgccatagcgaggggcgcgcggggtcctactcggcccgggctgcgcgcaggggctgggttgggcgggccgggcgggcttggggtgccctcctgcaaggtccccaccgacagcccccgagctctgcctcaggctgcaaatccggagcccggcggcctgacgggtttatgacctggccgcatatgcggctcctccccccgggaaggctgggctggagcccaaaggccgggattgaacaggtccgcatggtccttgcacactcagaccccaagtgttctgc

SEQ ID NO: 40589 - DNA, 1232 bp, Homo sapiens
  chr8:11058136-11059368
  binary
cggagaggcgacacaggcgctgcgcccccggcgtgggggagaccctcacgcctgggccaccgcgggccgcgccgtggacgtagccggcccccatcatgggggggccccggctggtgagcccctccacggcgcccagcccgccgcccgtgtagtcctgcacgaaccagcggaagctcaggctctgcaccagcagcgacggcaccagcacgaagaagagggtcagcccgaagtagacgtagtcccccttgcggtagtagtcgagggccagccacaggtcggtgcccacgtccccgaagaacaccagcagcgccagcacgatccacaggcagtcgagccacggccgctccacctgcggcggcggcggctccggccgcgcggccgagggcgtcgggggttggcggccggcgccgggggccgcgggaggctgcagcggctggtcccccccgtcggcggcggcgctgcggcgcggcttcctgcccaggagggagcgcaggcaggcggagcggcagccccagtagcacgaggaggtgttgcagcagtggcagatgtgcatcgagctgctctcgccgggctcgctgccgtcgccgccgccgccgcagccgcctcccccgggctccccgtcctcctcgccgccgctgcccaccgcctcgtccaggttgtgcagctgagcgaagcccacccccacgccaccgccatcggatttcgccgccatcttgactctcttcccagctccggaggttgggggggagggacggcggggggggggggaagaaggcagggaacggggagggggggaaacgaatggagaggaaggggggcggggaggaagcgggggagcaaacgaacgaggggggagtgggccagggaaccccctccgcttccgggtagttggcgtcacttccgggcgagccccccaatcgcacggcgcccgcagctccccagccctaccctcccggccaagatggccgccctcctgtgcctcagctgctgggcgggggaccggggggttctccccgccagggctccccttcccctcttccgttgaccccgaaacccatcaggttgacccctcggcgtttcagaatccggctggcccgagtgaggcggtccaaagtgatccctggagggggcagtgccagacgttttggggtccccttcctcagcgtcgcagctcacagctttcctcctggagaaacgccccctaacaccctcccggctgctggtggaggggc

SEQ ID NO: 40590 - DNA, 1283 bp, Homo sapiens; identical to SEQ ID NO: 23371
  chr8:110986113-110987396
  hyper

SEQ ID NO: 40591 - DNA, 131 bp, Homo sapiens; identical to SEQ ID NO: 33945
  chr8:11708345-11708476
  hypo

SEQ ID NO: 40592 - DNA, 303 bp, Homo sapiens; identical to SEQ ID NO: 22592
  chr8:124186923-124187226
  hypo

SEQ ID NO: 40593 - DNA, 440 bp, Homo sapiens; identical to SEQ ID NO: 16107
  chr8:128893135-128893575
  hypo

SEQ ID NO: 40594 - DNA, 208 bp, Homo sapiens; identical to SEQ ID NO: 33950
  chr8:129069818-129070026
  hypo

SEQ ID NO: 40595 - DNA, 2429 bp, Homo sapiens
  chr8:132051918-132054347
  binary
cggtgaagaagcccagcaggatgcccttgagcgggtccatgggggccgaggccaggctcaagtgtaggaccaagagagtgagtttggtcagcacgtccagcacgttcatcaccacttccgatttgcgcctttggcccaagaaatagcgctggtagaggcgttccaaatcccgagatttgaaggagttgcgcagggtggggaaaatgacccctcggtagctatagcccccattaagaaagaaatccgagttgctaggggcacagtcaaggtgcaggaagcccaggtcgcccccgcctccgctgccgctggcactgccgctcccgctgcgttccgggaagactttggtgccgcaggtgctgtgcgctcgctctcccgggcccagcgagtagaggggcagcgccgagtcgcctgacagctgcggcgcgtggtggttggggccgccgcccgcagggtccgaggctttgcccgagcctccactcccgctgccgctgcctccccggtgcccgtgaatgaagcgctgctccgtgatgtgtcgcaccgccgtctgccacagcagccgctgcggccgggaggcgctcctgccgtcgccggccgggggcgtcgggtggatggtgtagagttcctcgctgcctgtaaggcagcgcacatcggagagctccatggctctgggccgcagggaaggaggcccagaaccttggggaggcagccggaggaggggttcctaaagactcaaaggcggcctggtaggagcttggcaaggatcctttttatcctaggctgccccgttgcaggagccctgcgctagggctccctgtaggtcgggtcatactgtgcccaggggcaaagggcacctggaagatcgcggcggacctcggcgtccttgcgtgctgctctcccgccagccggcgcagcttgggtacgcagcggcagtggctatttgtcctcaggagccgcagcgctgtgagccacgcagccccttcctgggctcaggctccttggttgattctaggctcagcgttttggcgcagcctttgctctccaagagacgcctaagcgcctgggcgccgtgcttctgctgcgcgtcgggcgggtcctggctgctgcactgggctttggacgcccactgctccgcggctgcagggggcctggccggcggtgaccggcggcagcgatgggtgcgaagttagcagatgtggctggaatcatcgcccttcggagaactccattgcgccgggatggggagcaggggcggagctgggggcgggggcaaagaaggaggaggagggggtcacggtgaggtggcggggcgccccgcgacagggttggagaggtggtagcctcggcgctaacaattcaccaaatagttaatttggaggaaggggtatgctgaggctccctcctaggctctttcctagttcgggagcaaggactgacagcgcagcgctggctctggccagaagcatccctcccggagggggtgtggggactctcgctccagggtcccagcctgagctataagacgaggtcaacgctttcagctgtgctttcgaagggtcgcagcacacagttctcatcccctttatttcgttctttggagtccatttggctcggagctaggaggatcaggagaggcgggggaaggaaaaagtggtgagggctccaaagccaagagctccgagaacgaagagaagccgccggtgcggatatctgaggctgagaaccgaagcttggcggatgaggcgaaggtttggaggagaagggaggcccgaggccgcgtggaagtcgacagagacgcctctggatctagggaagcgccgccgcgtgccaccctggagctctgaaacgcaccgcgggcgccaggcgactgggagaaatttggagacctgtcagagtggtcagacacccgcggtgacttaaacccgcccccgcgccaagccacgcccccggaaccgggccgggggtggcggagggacctgccatccagatctggccaggacgccccaggtcttgtaggcagaggcacgcgcgggccggcgtgggagaggaccactgagggctagggccggcgggcgcccccggccttccctgggcgcactgcgatccagcgttccagctggccgcgccagccggttcctccgctgttcttttttaggcattggctcttgtcctctgcaggtgcggagccaggactcgtaggccgctttgcgcacggactcggagagcccagcgcgacggaatacagggtttccttttcgcccttcctacccgtgcgtcttttggcaaagccaactttcgggctaaacgcaaaatcccccaagaggccgcaatcatagaggcagtcagtttcctacaggagcctctttactacctcgatccgaagggggtggagggtacgggacatcaaaatggggacgtcccctgcctgcctc

SEQ ID NO: 40596 - DNA, 1897 bp, Homo sapiens
  chr8:140714443-140716340
  binary
cggggcccaggggctacggagggtcagtgcctctcacgccccaggcgcactcccctgccacctgagtccctctaggagccatgggtgccaggccagccctctccaactcccagagaggtagtaagtgtaaggctcagagccccgcgcagcccagcccgcgccggggcggtgggtgggtgggtgtctgctatgggattattcttagcgctccactctcttcgcaaaagtggcgcctccgccctcccggctcaggcacactcgctcggggctcgcacgcccggcccagacaccagcgcggtggagagcaccgggtggggtccccgaagggtgaggctcggaggcgccgcggagggggggctccctagagaggagggggcgctgcgggaaggcccccaagggaggctgcgtttaaccctcgacgccctgcacccagcccggcgcggcgcgctcagccgcctccccggactcctcccggggcgcgggagcccagcggcgcgcccagcccttacctatggtggtgatgaccgtgatcgcaaagtagaaggagccggcgaatttccactggacgccggcgcggtgcggttccgactgcaggatcaccagctccagctgccggtagtcctcgctgctgatgttgtacttccccttgatccggatctcctcggctttgagtttctcctcctcgcgcatctcgtggtccgactcgagggcgtcgaacacggcggcgcccaccagcaggtaggtgaaggtgcagacgatgagggacagagtccgcacgttctgcctcttcatggccgccagcaaggagccggcgcggggggcatgtcccgcaggctcacagccgcgcgcgtcccactgcagcgcccggcggccgccgccgcctcctcctccgccgccgccgccgccgcctccaagttgtaagcggcggcggcagcagcagcagcagcagcggggaggcggggggcggggaggctggggggggccccctccgctggggccgccacagccaccgccaccgcgaggcggctggcggggcaggggcggcgcgggcccgggctcagccgagaaggcggacaggcacaggaggctgctcgagcgccggggccaggcgtccgggaaccccgacaccctgcgccagacccggccgaagcagcccgccccactgcgcagggccatgcagggcggccccgctgggtaccgcgcgggccttgctgccctccgcaccccgccccccgctcccgcgggaaacgcagggacgggaaccggagccagaaagcggccggagggcggccgcggggcccggtacccctgtgggtccagctcgcgggtggcggtgcccagcaaggagcctgcaggtccgcgcgcccagcggaacctgcttccccttttacccctcctcgccccctctcggtggtggggaggaaaagtttgcgaagtggcggtgtctctggagtcccctgcaagcggggagggggccgagcaggtgcagcgggaggggcagcccgctccccaaaggtccgcgcgcccagcgcccacccgggcgcgcgggtgcgcagcggggtccccgccgggcgtcggccggtgcgcgaagtttgctcggctcaacccccaaggcgcgggagcggggcgcggccccaggacggcagggaccgcgatggagcggcttcgggggcggccgggggacggcgcggtggcggtcggccagcccgctcctccgggggcggcgggcgcggcggcggcggcgggaggggtcccgcgggcctcgcggagcagcggggcggacgcgggcgcatgagccgcgcgggggtcggggccctccggcgtccgggcgtcccgggaggcggccgccgcgctggtctgccccgggcgctacgtgcgtgcgcgccgttgggagccc

SEQ ID NO: 40597 - DNA, 131 bp, Homo sapiens; identical to SEQ ID NO: 22594
  chr8:140932087-140932218
  hypo

SEQ ID NO: 40598 - DNA, 110 bp, Homo sapiens; identical to SEQ ID NO: 22595
  chr8:140950018-140950128
  hypo

SEQ ID NO: 40599 - DNA, 401 bp, Homo sapiens; identical to SEQ ID NO: 33957
  chr8:141596808-141597209
  hypo

SEQ ID NO: 40600 - DNA, 307 bp, Homo sapiens; identical to SEQ ID NO: 32259
  chr8:143558404-143558711
  hypo

SEQ ID NO: 40601 - DNA, 524 bp, Homo sapiens
  chr8:143623409-143623933
  hypo
cgcccaccaatttcaacagcctgccggccaacgtgtccaagctgcacctgcacggctcaccccgctatcccggcgggcccctgcccgacttccccaaccactcactgaccctcaagagggacaaggcgcccaagtcctccttcgtcggtgacggggacatcttcaagaagctggactcggagctgagccgggcccaggagaaggctctggacacgagctacgtgatcctgcccacggccacggccacgctgcggcccaagcccaaggaggagcccaagtacagcatccacattgaccagatgccgcagacccgcctcatccacctcagcacggcccccgaggccagcctccccgcccgcagcccgccctcccgccagccccccagcggcgggccccccgaggcaccccctgcccagcccccaccgcctccgcccccaccgccaccacctccccagcagcccctgcccccaccgcccaatctggagccggcaccccccagcctgggggatcccggggagcctgcc

SEQ ID NO: 40602 - DNA, 206 bp, Homo sapiens; identical to SEQ ID NO: 33964
  chr8:144383330-144383536
  hypo

SEQ ID NO: 40603 - DNA, 97 bp, Homo sapiens; identical to SEQ ID NO: 33966
  chr8:145223917-145224014
  hypo

SEQ ID NO: 40604 - DNA, 829 bp, Homo sapiens; identical to SEQ ID NO: 27283
  chr8:16884178-16885007
  binary

SEQ ID NO: 40605 - DNA, 78 bp, Homo sapiens; identical to SEQ ID NO: 22599
  chr8:18541368-18541446
  hypo

SEQ ID NO: 40606 - DNA, 547 bp, Homo sapiens
  chr8:22960460-22961007
  hyper
cgcgcacgaactcagccaacgatttctgatagatttttgggagtttgaccagagatgcaaggggtgaaggagcgcttcctaccgttagggaactctggggacagagcgccccggccgcctgatggccgaggcagggtgcgacccaggacccaggacggcgtcgggaaccataccatggcccggatccccaagaccctaaagttcgtcgtcgtcatcgtcgcggtcctgctgccagtgagtcccggccgcggtccctggctggggaagagcgcacctggcgccgggagggggcagggagacggggacacggcagggatgcctggccctggtcacctgcggccgggcatgtccgggcaggacgaactcgccgtcggagtcaggggaagaactgggtccccgggctgggcaggagggacccggccgcgagggagcagagaggcggtccccctggctgccccgagcccgcgaagggagggaagttccagaatcgagagagggagggagtcaaggtggaacccatagagtgagcctcctgaagacacagagc

SEQ ID NO: 40607 - DNA, 794 bp, Homo sapiens; identical to SEQ ID NO: 25930
  chr8:23020923-23021717
  binary

SEQ ID NO: 40608 - DNA, 334 bp, Homo sapiens; identical to SEQ ID NO: 23651
  chr8:23423722-23424056
  hypo

SEQ ID NO: 40609 - DNA, 995 bp, Homo sapiens; identical to SEQ ID NO: 23381
  chr8:23559353-23560348
  hyper

SEQ ID NO: 40610 - DNA, 823 bp, Homo sapiens
  chr8:24812767-24813590
  hyper
cgccggtgcagcagcacggagcacactcccagactacagtggcgcccgcactcacgcccttcaagtgccccacccctcccacacagtggccaaggagccaagccctatccctaagagctgcgtgcagccgcaccacccctggtctccactttctgggcgcaccaactcccccccttgctcgagtcccccgcccccctgtgtttctggccgtgccgcacctgcatagcgctgatgtcggcgttctgcttgtcctccagctcctgcagctgcttctccagcgcttcattcatgccccggcatgcttcgatttccagggtcttggccttgagcagacgacggctctcggacacctcgtccttggcggcgcgcacggcgtcggtgttcttggcggcgctctcggtcagcacggtgaagcggctcttgaaccattcctcagcgttctgcatgttcttggcggccagcttctcgtactgcgcgcggatgtccttgagcgcggcggaaaggtcgggcttggtcacgtccatctccacggagatctgcgcgtactggatctgcgcctgcagttcggcgatctcctcttcgtgcactttcttcagaaaagagatttcgtccatcaagctgtcgatgcgcttctcgagctcggcgcgagcgagcgccgcctcgtcggcgcctttgcgcgcttccatcagccggccctcggcgtcctcgcggctcagcacctcctcttcatagcgcgcctgcaggttgcgcagggtctcctccagcccttcgcgctcgccctggagcgcctgcttctcgttggtggcatcttccgccgccaggc

SEQ ID NO: 40611 - DNA, 1493 bp, Homo sapiens
  chr8:24857735-24859228
  hyper
cgctcttcgatggacactaaatgcgggacatctgttttacactcaccctccctccccgcgtggcaggagacctacactctcccgctatgcgcgctccgcggcagctgccgctgcaccattcattctctcctgcagaagttcaatattgctgcaaatatcgagaaaaaaaaaaaaagcgctgagagggggagggagggagggaggaagggagggacagcgagccagcggccactgcaaaggggcgaagggcagtcccgcggtcagtaagggccactgaactttctgcccaccggtcatccggagctgaggactgggacatggtggggtgcgtcggcgagggtcccctgaccctgcacaaacccaggggtgtggtgtggatgacccgggaagccgcacccagagctggcggtatgtcaggccatagagaaaaagggatgttcctaggctaaaggagacatcggggctggggatgacatcccaaaactcccagcgccggggagctcaggctcgggcggtgcctggctcccctccccggttcccgccgcaggaggctgctgagtcactcccgcctgagccacggccgcccccagccagccacgcgattggcgggttagcccgggcgcagcgccctcttcccagctcccgcacccccagggcttcccgcaggcagagggtgggagccccggcgagcgaccagttggggcttggtaggaaccccctaaaaatgcgccccacttgtgcattcgtgcatgggcgcattttgggagtaaacaatacataaccttcttcgcattcaaagggtctggactcaaaagagggctcagccttgctcctcgggagcaacccctgttttaaatctgggaaatggtgatgccagtggggaaagggcttctccgggcccggggctcccgagctcctggtgccagccgtgttgctctggcttttgtattttaactccgtgggcttctgtccccatccccatgtaaggccagtgcccccttccgcgttttgccgaaagtatcttcaatgcccgtttaaaaaactatgtctgcgatttctccatctctgctctttcccagttcctctcttttctcttcttcaggccccctcctgtccttcctcatcctttcactgagcgggttcaggccctagttactaccgcaggcaccagccacacccggggagatgtgtgctgttttgtgcaagacgctgcggtcacccagtccggaattctgctggtctacaccgagtgccgcaacaccaccaccacctccgcacacatacgccctccttgaacctcttccccatgaatgctttggcttttaaggaactttgtggcgtttctgctctttcggaggcagctgcccgaggcagcttcccaaggcagaacagggactgactgctgaggttccgcggggtcggggaggtggagaagccagttcccaagtggctcgtcgcgggtgttagagtccctcgttactaaggacgccgcc

SEQ ID NO: 40612 - DNA, 200 bp, Homo sapiens
  chr8:25397060-25397260
  hypo
cggcccagttcaacagactgtgagcccggctggctgctgggcgtgtagcgatcactgaggacaggtcagcctggggatttggagcgcagctacctgcagtacctgttctaactccgtctgtgtcggagcgcccttctgttatcctcagtgcattagcatggctatttttttttttttttgagacggagtctcgctcttcc

SEQ ID NO: 40613 - DNA, 146 bp, Homo sapiens; identical to SEQ ID NO: 22604
  chr8:26481184-26481330
  hypo

SEQ ID NO: 40614 - DNA, 191 bp, Homo sapiens; identical to SEQ ID NO: 22605
  chr8:27315867-27316058
  hypo

SEQ ID NO: 40615 - DNA, 304 bp, Homo sapiens; identical to SEQ ID NO: 32268
  chr8:28938419-28938723
  hypo

SEQ ID NO: 40616 - DNA, 973 bp, Homo sapiens
  chr8:4849354-4850327
  hyper
cggtacaggagctcgcacttgaccccgcaggcgtggaggagacacggtccctggtccctgtggggttaatgaaggagctccacggacccactgcctcgtgggccagacaatagcgcagtgagagctacgtccgagcgtcctggaccccctccgcgcgcacacacttgcgcacagcacctctccagctccatgcacgccaggggcctgggaccctgggctccacttctcggcttctacagccaggttctgggacctgcagcgcgcaagaggagctctcttccacggggctgccccgcagggcccgaggcgcccaggactttgcaacccctgccctgttcgccccagaatcatccagagcagcccccgcccactacctggccctccacaccctccctcccgcctccgcctcagcctcatcctagcgctgcagcccacccgcgtgggggcggaatccgcccggcacacacgtgtgcggattattaagcagccgagctagggccgccgcggtctccacgcagcaacctctgctaattgcgggggaaggcagccggagcgtgcggaactcgagggaaccgagagtgagctcagaggctgagttgcctgcctggaaaggaggaagccccgggcccagttaggcttggagtgcaggggaaagggcgggaagttttgcggagttgcgtggcaggtgtttcctctccacgcaggggctcggctggaaaaagccaggtcctgtcccttgggctcctgccctcaccccgctgcgacacacacgccccagcacacctcacagggcacaaccctcttttccctagactttagctgcctcgccttccaattcccagccagtccagtgctgaccagaggccgctgccagtcgggccctgctcagcaggcgctgcctccgcagccggcaatgtcagaggcaccggccaaggcatccggactgagccgggcgggtgggcagagggtcggc

SEQ ID NO: 40617 - DNA, 722 bp, Homo sapiens; identical to SEQ ID NO: 36930
  chr8:49292881-49293603
  hyper

SEQ ID NO: 40618 - DNA, 1394 bp, Homo sapiens
  chr8:50822475-50823869
  hyper
cgcggcctgtttggttttccgtcccgagtgattcccggctcagtaacgtttctcctccagggagcccactggaactccactggctgtgccgcctcctcgcccgtcccccgcgcgcgccgcaggccggtgcttggagagcgcaatgtccccgggagggaagatcccctacctggaatggatggttccagaccagcgggaacgcgctctaatccttgatggaagcaagcgtgggaggaaagcacaacgtctaggacttccctgtagtgtcagaacaggaagaagaacctgagaagtcgccggggaagggaggccaggagcaggcgtccggccccttcccacagcccgggagaaattagtgttgcgccccgcccctcccggacccccgtccccaccacacacaccagcgcccctcaccagtctttctcgaatttcctctcatgtctatcaataacctccttgtgcagaaatctacactgcacaagttaggagtctgcaagggcgggcggtgttacagtctcgctctttccattttccccttttactccacatagtttcaaaggtccacatggccctggttttgaccagttttccaacagtttcaacgttatgtatttcaacttcccgtctcagttcactggcgtctgcacccgttgccgagtgtgggtggctgagccctgggtgacagcactcgggaccacgcacccatacccttctttatgctcgttgtcagccagttgccaagagcgggagtgaagagcctgcaaggcccgggagagcgcggattccggagtagggaggcgagggggcagcgtgggagaccagagggaaaatgggctgaaaagccaacaaaaaaaacaacgtaaattgggctttgctctggctttacaaaggcagagattgtcgagccctctgactgtctttgtgccttctttatcccgtcctttgtgaaataagccgttttctgcccccactgcaggagcctaggctgtgggcgactcgctagcactgccctgggcctccaagctgcctgctcgctgagctcagcgctgacactcacaggagctgcgttcgccggatcctctgagaggctctgcaacgatcccgatccaattcagcagcgttttaaaaggtagccgagtgcagatgctttttcctgtctttttcattctttcattctctgtcttttaaaattttaacaataacctatcgtttccgcgtggagggtctaagaatcttcactgggtttaatttaggaatttcaaattgggtttctcaaaatttgaatgtggtccccttaattggtaatcaagattgcggagttttccaaaatattccttttcatcttatgtaattaaagatccacgagctttccaaagaagctctggattttccac

SEQ ID NO: 40619 - DNA, 674 bp, Homo sapiens; identical to SEQ ID NO: 25941
  chr8:57069543-57070217
  hyper

SEQ ID NO: 40620 - DNA, 1000 bp, Homo sapiens
  chr8:57358311-57359311
  hyper
cgcgtactgttgcggaaactctgtctcacaaggtgcgcaacactcgccgcgcgcaacactcaccaggaagttgatgtcggccgggcgcactaggcggtagctgcacgtcgcgcaatcctggctgcattcggcccgcacggtcgccaggagcccggggccgagcaacagcagccaagtgcaaagtgtcaggaaccgcgccatggactgcgaggagagagggacgcgtgcttcgagcctgcctgggcgcagaacggggtccctcggcaggaccctcgccgcgacagcctcagcaggggatcgtcgagcaaaagcccgcaggaatgctcctttctggggccccgccctcccggccgacagcttttaggtagacgtggaggcgactcagatcgcctcgcggttcccgggatggcgcggtcgcccccaacgcgaggctgcctggggcacccggctcttttcctgggcgtccgcggcccagggcaagattccggagagaacgccgcagaccaggggcgagagagcgggagccgggggaggcaggacattgactggggtcacaaagaagaaccagggaacgctgttggggaacccatgcaatgaaatgtgaagggaaagagggcgggcagacgtccccaaacccgctcagcaaagacaagcttcgggcaaattcactcacgttgacgctgttcggatggagcaggccaattggaaaagccgggttcagacacgactctagagggaagagaagaaggcaagtgtgaggagggcgggcgtcggggagaagcgggcccgggtgtgctggcggacgtagggcctcaccgtcgcggtcctcagcgtctctgcggggtcacgggccaggctgcggggctctgagcgcctgcctcgccgtcccggggcttaacggctgctggagccactttataattagccccaaaccgaaggaggcgcgcgcgccccaatcgccggcgggctgcagctgacgcaggccctacgccagccccgc

SEQ ID NO: 40621 - DNA, 353 bp, Homo sapiens; identical to SEQ ID NO: 22960
  chr8:57360555-57360908
  binary

SEQ ID NO: 40622 - DNA, 423 bp, Homo sapiens; identical to SEQ ID NO: 36933
  chr8:591520-591943
  hypo

SEQ ID NO: 40623 - DNA, 376 bp, Homo sapiens
  chr8:6434310-6434686
  hypo
cgtccgcaggtgagccacccgcctcggcctcctaaagtgctgggagaggcacaggcgtcagccacagtgcctggcctactgtcttctctaaaatggcatctgtgcattcatctcagccgcccctgctcagataaaagcaatggcgcctcctttgaaatctgagagacgcagggccctgcccattctgcggaattccttctccctgctgcctgctgtgaggaggccccctttgccacggaacctgaaattcctgccactggaattacgctctggacaagcggcaagatactcctttcagtcccagccactgggttcctgctgcacaggaggccagggtgctgtgaacctgctctcagccccgggcaaagggaatctc

SEQ ID NO: 40624 - DNA, 1431 bp, Homo sapiens; identical to SEQ ID NO: 28234
  chr8:65289998-65291429
  hyper

SEQ ID NO: 40625 - DNA, 904 bp, Homo sapiens
  chr8:65488211-65489115
  hyper
cgccaaagtggggaaagaccacgcaggagccaggtgagaccctcgcggtgggctcggggacttgtgtgtgcacctcgcgctgagaaggctgcctcccggggctcagggtttgtcttcaaggtctgttcaaatttaggctaactcgtccccaaacagtagtgaggaccagtatgttttctgtaaaatagatacagacaaggaaaatcttttcgaaagaacgctatacgaacaagtttcaactttcccacagtcgaaatttttggaattgccaagcaacttggaaagactagcaagacggggggcccttggctcactgccaggaatgcgccagctcgcgctagtcccccagcgtcgtcaccctcgctgtcctcctcctcatgagcccacacatgtggacccagtctctctgaagtgagctttgtaggactcggcggcgaaggggacgagaaaatacagatgacaaaacgacgccgaaaggcttgacctctggggctaatctctctgcctccgagtagatcccgcgctcccaaatccggcgggggcgcagtatggtgaaccccacacctagctccctcagctgcgtgggtttcaagctgacccaggcgccaccaggcagccccgagtgggcgagtcaagtgcaacttcaaggtcaatgtgcctctgactggggcctggagagctgccaagaatgctgggcttggagcgctggggtcgcgccccgctactgcgccttggaccccgcagtggagggcgctgagaccgcacccccctccccgggcagttttcaggagagggtccagctggggtctccgcggtggggtccagaaacgatattccgggttggattcttcctcggttggggaagcacagctggcggagaattcccacggctctcagtggattc

SEQ ID NO: 40626 - DNA, 887 bp, Homo sapiens
  chr8:65489483-65490370
  hyper
cggtgctgtctgctgaatattttaaactcctttcaaagcagtaggtgtattccctcccgcagtaacaaaacgatattcatctttacacaaggtgctctggcgtttataatttggtatccaacacccggccgagaatgttccctttcctgatgctttggccaaccggcctcgataagccaaccagcccagaaccaggggcgctgggctgggtgttcctcggggacggcgcccactgcccgcttggtccctggagtgtcccgagctgcctcccatacccctgctgcggacagagtgggggcagtcctctgcctctgtttcccaactgctttggtaactcagtgactctctgtgaaactgcagagtcagaggacttcccttccgtagttttcattctaagcggtcatctgtgagtcagaagatttcgccgtggcctgatttcccaccctttctgcccgcgcaagccgaaagcgctcatgttggcttttcctttgccacttttccaacttgccagttccatcaggagcccggatccttgcccagcttcttggcggagccaagttcgagcgcacagatttcccgagctccagcggccagggggcactgtgtgagcggctgacgtcacccctccgcccggccgaaaccaggcggcgggatcccacacagttgaggagagggagccgaggccgtgacttagggctggcgacgattaaaccaagtaacgagacaccgggcagatgtgttttcattgccctgtaagataaatgcagtgttaagtgcctgacaacttcccagaagcaatcagcaaaagtttacgagtgcataaacctcaaagaccattccctatcggttgttataaggccggtatttagagcttccataaattcttc

SEQ ID NO: 40627 - DNA, 2224 bp, Homo sapiens; identical to SEQ ID NO: 35156
  chr8:65492354-65494578
  binary

SEQ ID NO: 40628 - DNA, 562 bp, Homo sapiens
  chr8:65710834-65711396
  hyper
cgcgtatgtgtgggaaaaagacagaagaagcctttgttattacaaagtcccaaaggaagccagtaccccgcagcaagttctgactgtctgcactggaaatcatggagggggactcccctcgccatctgggtcgcgcgcggcccgcggggcccagggcgcatgcgtggcctggcggccgaggcgcttacctggtgcgccggacaagcaagcagagggccaggagcagcagggccgcggcgagggccaggcccgggaggcccaaccgctccagcgaaaagcggcccgtggccgcggacacttctcctgccatccggcgcgcgctaggccgcggtgggcagcccggggtctgcctgcgaacagcgcggtcggcgactctgcagcctgcggcggcttctctcggcggcgccccctagtccagggccggagaggctggcctgcccgcagcgcagacaggaatgtcaccgtggtctcccaggctgaatgacaaaagttcgtggactgccccctccccgcctatcctccacccacgcgtaccgccccgttcccccaccgtttccgaccc

SEQ ID NO: 40629 - DNA, 943 bp, Homo sapiens; identical to SEQ ID NO: 29481
  chr8:70946701-70947644
  hyper

SEQ ID NO: 40630 - DNA, 1871 bp, Homo sapiens
  chr8:70981729-70983600
  hyper
cgcgtactcgtggctgctgctcaggaagggcggcacttccctggggacgtggggaattgggtaccacggtggcagcttgctgtaccagggcagatcgtagagaggctccctctgtaggcccagacccgggctcagcaagggaggcgccatccggaaggggaaggggggcatggcgggggcagcagacgctgcggcctccagctgccggaaaggttggaagtcttcctccacggtggccaggctgtttctgtagtgtccataggacgggaaaggcgtgtagtacgcggccaggttctgcgggctgctctccggcgggtagcacaccttgtcctgaggcacggcctcacttggccggggtagagccatcccgggaccgcacgctcggcggctctgcagaaaagcgggcgccgctgaggacaccgcgcgggagcttcccggggtccgacccgcgcctccccaccagcctcctccaccccagccagccccagatccaagggaacaggataaacgcccccagtccgatcccgccagcccgctcccacaattaagacaaaacgaaaaaacagcaatagaagcaaacacaaaaaagccccaaacggaaatctgccgggatcctgccctactctaaattccgggttagtgttgccttccccttccctctccaagcaccccttccctaagcccggccgccttcccacacccgctctccgctttcggcccccaacccggttcctgcaaaacccattgaagttccctttccttccttcttctcagtcctacaaaactcgttggtagggtctgtgggagccgcggggccctgccaacctcggggctgggccgggagccgagcgcaggcggtcggagggcaatggagcaagcgacagctccaggcgctcctgggccctcggctgggagggaagagccgaggaccctgggtcgcaccgcgcagatggagacgcgctcccagagcccccgggcaggtccagggaccccgcgacctgctctggcccagcggtgtgaccccgcgggtcctggcggtcctgactgcccgcaggggaggggcgcgccacttttggctgccctaggatgcgccgcctgaacctcttttccctcgcgggcagcgtccgccacattccccgggttcctcggaaactccaatcattctaccaggactattggggcctggggtagcccctcgggagccgcgtggacgagccctggccaggtgggagcgaagagcctcggcgactgccagtcctcccgcccccgcaccgccgggaaaggatggcgttttaatagacaggcagcaagttcaccgaggctgaagaatgaagccccttcagggccggcgggtcttgagatcaatgagcccaataagaaaaccaagcagggtcatgactcagaaattaaagaacacggggtcaggagaagaggtcagccacgacacaggcagcggcccgtctcctcccgatcctccaaaggcgcccttctcctagcctcctccgacctcagggatctgcaacttgggattcaaagcccccgagagggcagaacgaccatccaaaacgaactgcgccagcgagtgctgccgccctccccaacggccctggaagaccaccgccccgggccccaggcgcgtcctgtcccgtgcctacctccgacaccacctccaagagcgccaccgcggagcgggcgcctcctggacgctgcggggccactcgggctcggtaggccactcgggctcggtagacttcgggcgggccctgagggctgagccaggcttaagagggcgggcggggccgcggggcatcgacaggtcgagggtagggaattgacccggcccacgcagatccccgcgtcgtcttctcccc

SEQ ID NO: 40631 - DNA, 1374 bp, Homo sapiens
  chr8:70983606-70984980
  hyper
cgcagccattggccgactctcgactcgccctctgtcccctggggtcgctcacttaactcatcagttttccaaaccctccctgggaccctagtggcgagcactcgccgctggccttctagggcaggcagtattgccgctccaggcgtgcggagtcggggagaaaaaaaccgaacacgtgtgctacccagggcccccagataagcccctccgcgcgcacacacaccctgaaccggagtccagaaggccggactcgcgtcccggggtcgagccccttactctccgctcccagttcggaagatcccagcctgcccgaaggcggcgtctgacccgctggtggacctggtgggtgtctgttcctgatacctggggacgaggcgggagcgccttgagcgctgggaagcttcgcctcgcgagtccccggcagtgacacgtgggagcgttgggcccggcacccccgacgcttccgaggtttcgggtggtcgttttgctctctcgggggcttttattccttaagtggctttaaacgaccgaggatgggcctcccgcgccgccgcagctgtcacttccttcgggaaaggctagcgaccttggacgcgcaggctctgaaaaccaaggtccagacccataccgagcgcccaaagaccgcatttgaattctcctcgccggccattgagggagagaaaggaacgcttagttccattcacattcacagaaagaagcgccgagggtgggggaaacgcagtcttgccgggtgagccgggacaggttcctcgcctgccccccggccgctgcttcctcttagctgaatggggagcgacccgccccgggcgcggccttcggggctgaagactgaggtgcagcctcacccccggcctggcagcggcttggaagagagagggaaaggaggaacatctacccggctaagagacgccgccagagtccctaaagctggcgggggacggaggccggggtcccggatcttcagagcgcccgcagccgggcttctgggctcctcggtgcggggaacctgaccctgtagccttcgccagggcgcggcggggctgcaagaagggaggaaggagtgggactagagccttcgagggcgcgggcggcgtgcactcagccttgtctccccgcgcgccctgccgcctgcttgccccctttgctgcaccgggtggccctggtccccgcgcccgcccgcccccgacgccttcgcgtggttccgcgctgcccgcggccagccccgtttcgcttcgcaaggagcgtgttgttttctcaatcgaaatgggatcaagatcccagggtttcctcgtctccttgttttgaggtgataggatcttagccaatagatcgaaaacgtgaaaagtacccgtc

SEQ ID NO: 40632 - DNA, 1000 bp, Homo sapiens
  chr8:72468560-72469560
  hyper
cgggtggagcgggcgcctaagctgcggatcactcctgcgggcgctcgctctctccacgccgccgcccgcgcgcccgcggcagccacgagcgtcccgggcggggaaacgcgttgcctcccggcggcgcctattactagcagctgcttctgcttagcccttcgaggatcggtttgccccaacccacggcctctcccagggttcggtcttctcccgcccctccctcccttccccgcctctcccccaagctcctcagtggccgcggcccgtcaacactgtcgcgcagtcactggcgcaggttcccagctctcagctgggggtttcggggggagggagcagaaggaatgagacagaaggaacgggaggctttaagcccaccgagggaggttagaggaaggcgctgtggctgtgggattaggaggccacagacgggaaccgcgccgagctagactagctgtagaaggctgtctctccaccccgccacagcgctccgagaaggagcgggaggcctgggcaggggagaggcgctcctgcccccacccgcgccctgctggccacctgtggcgtcggggagaccacctgcggagagggtgcagggatgctgctgccctgacgaggggcctcccggggactagcgaaacgtttcgcctcgccggtgccgggggagagcgcatggtgacaccagggcagagtagccatggcggtcctctccctctttctggcactccactgtcagcgtcggctagaagcaaacgcccaggaagcactaaccgatgcacacaaggtttcgatggacagggacaggaaaatcggctctgcagcgcgggggagcgcaggctggaggccgggccactgaggtggccccggctgagcgactggcgtcggtttctcctcctagcgctaggcgggagtgggaccccgggccacagcaagagtcgccgggtgaggacgggcccggcccgtggcgcctagctgtaaagggccctaatgctgcgcgtttgtc

SEQ ID NO: 40633 - DNA, 1631 bp, Homo sapiens; identical to SEQ ID NO: 22967
  chr8:72755373-72757004
  binary

SEQ ID NO: 40634 - DNA, 801 bp, Homo sapiens; identical to SEQ ID NO: 22969
  chr8:77589904-77590705
  binary

SEQ ID NO: 40635 - DNA, 730 bp, Homo sapiens; identical to SEQ ID NO: 25948
  chr8:79428304-79429034
  hyper

SEQ ID NO: 40636 - DNA, 416 bp, Homo sapiens; identical to SEQ ID NO: 22619
  chr8:8731310-8731726
  hypo

SEQ ID NO: 40637 - DNA, 1395 bp, Homo sapiens; identical to SEQ ID NO: 32293
  chr8:8748226-8749621
  hypo

SEQ ID NO: 40638 - DNA, 101 bp, Homo sapiens; identical to SEQ ID NO: 8778
  chr8:8898512-8898613
  hypo

SEQ ID NO: 40639 - DNA, 518 bp, Homo sapiens; identical to SEQ ID NO: 25955
  chr8:91657148-91657666
  binary

SEQ ID NO: 40640 - DNA, 1072 bp, Homo sapiens; identical to SEQ ID NO: 25956
  chr8:91996920-91997992
  binary

SEQ ID NO: 40641 - DNA, 555 bp, Homo sapiens; identical to SEQ ID NO: 28249
  chr8:98289833-98290388
  hyper

SEQ ID NO: 40642 - DNA, 1140 bp, Homo sapiens; identical to SEQ ID NO: 25960
  chr8:99985860-99987000
  hyper

SEQ ID NO: 40643 - DNA, 1296 bp, Homo sapiens
  chr9:100610353-100611649
  hyper
cgtgccaccgcccacctcatgctttgggcgccaagcagccaagcaaccgggttgcgttgtagggggaggcaatcagccctgttacccctcctcaggcggccggactgagctgcgggatgggatccctacagagactggcctgggtaaggggaaaaaatcactgcctcttcctgtgcctctagtggttgaactagaatcctggctagctcatctcgcttttgaagggggaaggggagtaatcatcggctcttttgagattgtcttgcaaaccatggactctctccccagaaatgaacacccacaatctagtgtgtaaatttcaggtttccaagtgttccaaagccgcgcacaaatttcggaaccagaccaagaatcctggactctagacgttgcctgggggccgatcctgcgcccagggtcccagaatctaactgaaatgcgcctgcgggccgccaccttcgccccgggccacggctttgccaggaatgcccgccgccacagctgaactcccgcccgcccgcctgggtcggatcagacgcgggtagtggcttgcgcttcgtggtcctcgggtccggaacgcagggaaagcgcgtggagccaacctagagcgggagcagggtctggcttgactctgtccccgattcgttgtgcgcagtgggacaagtccgcgccgtccggagccgacttccccttctcgttgtggccgtaaagctgctggacctccaagccggctcctgcgctccccgctgctctgagaacactgagtgtcccgggcccgcgcagactgggttgggagagggctctgtgggagggcttgcggggagcggggtaagaaaggctaggtgcttcttacctacgtaagaaacgttggtggcgggatctaagcaaacggggaggtgggaagcagaaggttccccttcctgggccccagttcctccatcctgtcccctgggtgacagtgattcgctgttcatagtgtttaagtggaccaacttaaagggagagagcgcttgccgagctctgggaaaccgaaagggtccacgcccgcgggagcctcggagactcaaaatcccccgctagaccgcagaaaatgttacactttaatcaaccgctacttcttccgtggagaggggcggtgggtgggggtgtgcgcatctcatcgcggcctgtgagtggaacaggctagaattatccccagcgtcttttttccatgtccaagtttcgccttaaaacaatttaaaagaggaagaagaggaccgcgcgtctgtaaggcgctccactttatcaccttgactc

SEQ ID NO: 40644 - DNA, 2472 bp, Homo sapiens; identical to SEQ ID NO: 39467
  chr9:100615135-100617607
  binary

SEQ ID NO: 40645 - DNA, 1242 bp, Homo sapiens
  chr9:104248306-104249548
  binary
cgccctgcggtcccccggagagagcctgggccgagcagaggatgcgggtcacaacgaccctgcaggagctcacgccccaagacaccgcgagcgcagtgcgacactagcgacgccggagccaagggccagaaagagggcgagacacacccaggtggatctaattaaccctccctcttggaaaaagaatgggggacgatgtccagggccctggatctagtgtctgtcgctgaccttgggcagtccctgccacgcttgagcctcagtttcccacccgtaggccgagctgaccgtctccatcgctgcgctccttcccttctgctggtttttcctggtcctgggagggacgccttcctctgcccagtcgccctcccccagcccttggctgcgaggtcgcccgcagaaacccaacactgctgccgcgctctcggcgcgcccggcgaacctaaggtgtggacgcgccgcgagggtcccctgcttgcgggcggccattaggcgccaggccccttggcgcttcggccctgctaggctcggcgagggtcttacccagactggcacgcgccccgctcgcgtccttctattgacctgtcagcgcagctggcgcaggcaagggccagggaggcgcccccgagacactcaaccatccccgcactgatgcgggcccctgctgccctggggacccctgcggggtcctcgcaatcctccggcaggaagcggtcggagctgcgggcagggccgctaggcaacccgcctgcccgaggcgcactgcccggggcacaggccctctgcgatgactctccccaacccccagctgccctgcttgtgccagctgtggccacccctaatccttgtcccctcgctctagtgtccagggctccgaccaccgcgccagaagggctgggcagatcgtgcgcaacagaaacctacccggttggggcgaccagctcggtcccctgcgcgcgccgagggccgcctctggtattgcccaggctggctagctcatcccggtggaggcgccatctccggggcccggaaggagcgggcgcagcgcggtttgggtgtgcgccggagcctcacctcctcccgcctcgcagctcaggcgcagggctccccttgctcaggcgggccatgtgacccgcgagctgcggagagaccgcggcccccaaagcggcttggggaaaaaggacggcaaaaggcgccaactgatgggcagccagggaaaagcaggagtcgcccccaagtcac

SEQ ID NO: 40646 - DNA, 245 bp, Homo sapiens
  chr9:116450208-116450453
  hyper
cgcggtgcctcgcgctccggggtacggagggtcggaaactgcggagtcagcgcttctgtcgagctcccagcgcagcccctgaggaccagctgggggtgggggtcaggggagggagcgggcgatctcaccctgcagcccgcacactcaggcctacactccccggtttggagcccagataaccccttcccgtcctcccctcacccgcgggaaccctggagagccggtaggggaggttcgcaccctgc

SEQ ID NO: 40647 - DNA, 203 bp, Homo sapiens; identical to SEQ ID NO: 16141
  chr9:126180763-126180966
  hypo

SEQ ID NO: 40648 - DNA, 109 bp, Homo sapiens; identical to SEQ ID NO: 20740
  chr9:126321044-126321153
  hypo

SEQ ID NO: 40649 - DNA, 259 bp, Homo sapiens; identical to SEQ ID NO: 23655
  chr9:126348901-126349160
  hypo

SEQ ID NO: 40650 - DNA, 318 bp, Homo sapiens
  chr9:130461599-130461917
  hyper
cggaaccgacactcgaggccgaaacactgtgagcaaggaaaaggccgacacccaacaccggtcacgcggcggatcagacgcggcctcgggactgggcttggggaggccgggcttccggggctagtaagcgtctactagccgggctgtttagggattggtcgcctctggccctggaggcgggggttcctggagtaagacggttgctgattggctggctttccgaggcggggttgtgaagcgttggtcattctatctgggtgctgggttaggcagtacgaatactaaaattggaaccagtgacacgcagattggtgaagc

SEQ ID NO: 40651 - DNA, 454 bp, Homo sapiens; identical to SEQ ID NO: 29498
  chr9:131872473-131872927
  hyper

SEQ ID NO: 40652 - DNA, 277 bp, Homo sapiens; identical to SEQ ID NO: 16143
  chr9:132633604-132633881
  hypo

SEQ ID NO: 40653 - DNA, 477 bp, Homo sapiens; identical to SEQ ID NO: 20746
  chr9:132874127-132874604
  hypo

SEQ ID NO: 40654 - DNA, 370 bp, Homo sapiens
  chr9:133366624-133366994
  hypo
cggcgggattgcgaccccgaaaggaggattttagttacaaagtgagagagtcattaagacgtggcggaggagagagcacctggccgggctgctccggggcctccacggaggctgatcccaccgtggccgcggccacggctgccacttatcctgccatcttgctgctaggctctgagctgggcacctgatggggtattatctaatattagctgcgcagaggtgaggaaacggaggcccccaggtgaagacactcacccaggctctcctggctggtgatgggcagctttgagccggggacaggccagctgtagcggccaagttcccagttactccaacagattccaggatgctcgtgatcaaggggcacggc

SEQ ID NO: 40655 - DNA, 610 bp, Homo sapiens; identical to SEQ ID NO: 24713
  chr9:133779351-133779961
  hypo

SEQ ID NO: 40656 - DNA, 543 bp, Homo sapiens
  chr9:133799052-133799595
  hypo
cggaatgcccgggttcaggtacacagcctcacggtccccggtgcctgccctgccgcccgcccagcctgggacactcaccgtccagccgccgccgtccgtgcgcatgtcacagtacacctggaagccggccgggtagtgggtgggaaagacagagtagacgccatcgtcctgctgtccgcttaggaggacgtccagacagtctcggggccgggagcctgagggaggcaaggctgtcagggtggctgcggccccagcacgttcctgcccagccccctggccaaactgtctgtccatcgataatgcatgtggggtcccatggggttgagagagcactggccttggagtccgaccttggctctgccactccctgctgtggctgggtgagagaatcaccctctctgggacttactctcctcatctggagaatggaccgagagggcttcagcgcaggccacatggaagtagggtcgggccctggagtctcatggctggggaaccctcaccccaacttccccgctccccagagctgggacccgaggcacc

SEQ ID NO: 40657 - DNA, 1276 bp, Homo sapiens; identical to SEQ ID NO: 36072
  chr9:135461876-135463152
  binary

SEQ ID NO: 40658 - DNA, 697 bp, Homo sapiens; identical to SEQ ID NO: 24715
  chr9:135645005-135645702
  hyper

SEQ ID NO: 40659 - DNA, 206 bp, Homo sapiens; identical to SEQ ID NO: 32321
  chr9:135865057-135865263
  hypo

SEQ ID NO: 40660 - DNA, 113 bp, Homo sapiens; identical to SEQ ID NO: 22641
  chr9:135908551-135908664
  hypo

SEQ ID NO: 40661 - DNA, 733 bp, Homo sapiens; identical to SEQ ID NO: 32322
  chr9:138661280-138662013
  hypo

SEQ ID NO: 40662 - DNA, 362 bp, Homo sapiens; identical to SEQ ID NO: 25984
  chr9:139704054-139704416
  hypo

SEQ ID NO: 40663 - DNA, 839 bp, Homo sapiens
  chr9:140024237-140025076
  binary
cgcctgcactgagagctcacggcttgcggcgcctgcgtctaccccgcgcgcagtcgccacggcaacagggcgggccttggttctgcttcgggcgtggtcggtgcatggtcctccagcactgttcgccccgcgggtctggtcctgggttcctttcgcctcctgtcgtcggacggcaccggctttgcccacggcctcgcggggagacgcagacacccgggacccggggaggcgcccgggcgccgccgccatgttgtcagggagcgcccgctcccagctcttcggttccgggacccgcggcgcggggatggggctgggccgcccttggtagccgtcctgggctgggggccaccctggccgcgtggtcaccggcaagaagcccagggcctcacccgggcgcggcgtcgcgggggccgagggaaggaccggaccctcccgaggtcgcggacccggccggctggggcgaggctggggtggcccctaccccgagctaagctggccgcgccgcatctcaccgtcgccggggcccgagcgctgcgcctggaccggcgccgagcgagggggccaagcggccggctggacccacagtccccgcgccataggcgggtcggggctttcagactcggctccagccctcaaacctggtagccttggaggtcagcttgagatgactgcgcttcctgcgcgcgttgtcctccccagaaacgctcaaaatggcaaagcggcgtccgtggccgccggaggcctgtgttctcccctgccgaacctcacgcgcggcccctccctcattttcttctggccaggctgccccctgccccttgggcgattctgctgcgtcccac

SEQ ID NO: 40664 - DNA, 369 bp, Homo sapiens; identical to SEQ ID NO: 33994
  chr9:140030217-140030586
  hypo

SEQ ID NO: 40665 - DNA, 724 bp, Homo sapiens; identical to SEQ ID NO: 33996
  chr9:140265361-140266085
  hypo

SEQ ID NO: 40666 - DNA, 422 bp, Homo sapiens; identical to SEQ ID NO: 22647
  chr9:140267962-140268384
  hypo

SEQ ID NO: 40667 - DNA, 917 bp, Homo sapiens
  chr9:140400223-140401140
  hypo
cggagataccggcaattcgaagggatgtggttggggaacatcgcacaagggtgtggtcaggtctgaatcgcacagtgcggaaaggccggctgagcctcctgaagctgcaggtgccacatgacaccaaagccggcggcgcccccaatgcaccagcaagccacggagagggtggggccccaggcggagggtgagaatgacagccagggcctaccttgctggccacggagctcccggggtgctcgtccgagtgcaggaagaccctggcacggtcacatgccatccccagatcagaagtggcactgcctgggccccctacacacagaggggacactcaggacacggttcgctaggccactgacacaaacgtccgcggtgtgggctgagcacaccctgcagtctaaccacacagaccccggcagctccctcgagggagtcgggccctgagatccctccacaccctgctttctttcggcatctgcctcaatggctctgtgacccaccagctacaggttttctccgcagcttaaacccacacggtgccttcaacatttctgggcactgataaaggtagcccggtcggtacctaaaacacggaaggaaaccagccctggtcctgagccaaattcctcaaaccttgccatgcgtgccacaccctgacggctcgctgcggccaaccctgggtagagcaccctttctcttgctgtccatctcagggatgctgccgccctctgtatgtgagctcccctaacgggtgccctgggccgtcacgctggtgctttgggcttggctctttgcagtcccagccccatctcagaggttcgctcttcgcagtccagccccatcttggagggagggggttgaggcaccccctccaaagagctcccctgttgctgcttttgggcggcctcgggctgagc

SEQ ID NO: 40668 - DNA, 232 bp, Homo sapiens; identical to SEQ ID NO: 16157
  chr9:140645189-140645421
  hypo

SEQ ID NO: 40669 - DNA, 1228 bp, Homo sapiens
  chr9:17905988-17907216
  hyper
cgtgcctacccagctgtcgtgggtccccgtcactcccgggcgcatgttgcaaaacaaatcaactccatgggaaaagctccatgagcgcccaggggacaagtccccacggacaaacatgtcataacgatttcagttttgtcccattacgtgaggttgtaagtttcttcatcattcccccctcccaacaagcacaaaatcgtccccagcccctggagcatcttgcggggctcccaggtcagcaacagcactcggagctccgagctccagggaaagcgctcagggaatggctcctaggactggttcctgggaaagcgccagcgtccagggagagatttccttctccaagggccggcagggtggcattccaagcgcgagcaaggtgggcagtgagcgatcctccctttaaaaaagaataaataaatagaagccagcgcgcagccccgctcgggtttcccgaagcgcacaccgctgtcgctgccggggcggctggatgtctgcgctccccgcctccgctgggctgacacgggaggggaggagcaggagctggaggggtgttgggggtggggggagcgcgaaccatctcgagccaagacaagcagcacattcacaaataacgcccccacccccagcgcacgcgctcccattcaaagcagacccgctccgcggccgcactgaagctccaaagccgcgccgcctgccccagcgcagctctgtctcgtggggcgcacgcccgagcccgcctgccggccgccgccgcggagccaccgcaatcagcgcaggaggcggccacctcttcgagggaggggtctcgcctgagactccccttggtccccgccatggggaccatggcacgactggaggcgccccagtgccccgggttcctggcccgcctcctcggtggcacctggtgcctgctctgtatcgccggacaggtagggtagcctgtgcgtcttgcgtccctcccggggactctgcttctaaagcctgtgctacagcgaaaagcgctacagcgtgggaggtgctctcttccgcgaaggtccatcctggggctgcgctgccgcccaggctggggacaagtggcgcggggttggggctaaggcgtaccctggggtcgatcgggtcgatctctgcgtttaggcttgacccagcttcctgggaccctgtcctggcttttcgcccttacctgggtcctgcttccagccaggcagagccggggcgagaaggcggc

SEQ ID NO: 40670 - DNA, 958 bp, Homo sapiens; identical to SEQ ID NO: 39479
  chr9:214559-215517
  binary

SEQ ID NO: 40671 - DNA, 504 bp, Homo sapiens
  chr9:23831115-23831619
  hyper
cgggacctgggaagaaacggtttttatgcttccgatgctcggaggctctttcttatattgaagatttatgtttccacttgtgtgcgatgcacgtctaatttgaaataataaaaccgggctgagcaaccagtcaatcagagccatccagggcgctccgcacgccgccctgccccccacctccctccggtctctaactctttccctcctcctccccctctcactctcctggccctccccgtcttccttcctccctcctcggctctcacacgcgctcacacttttacccccacgtgtgttcagatcaaacccttgtcccacagagcaagtgccggcaccgggccacggtgacaaaggcggagtttgtatcagaagaagactgaggcccggggagacacagcggctagagaaacagctgtcttatcagcccgctgcagagatggagatggcttgagaggtcctcaacagataatcacttgaataggtttgcaatgcgccaaacttcac

SEQ ID NO: 40672 - DNA, 712 bp, Homo sapiens; identical to SEQ ID NO: 25991
  chr9:35675509-35676221
  binary

SEQ ID NO: 40673 - DNA, 809 bp, Homo sapiens; identical to SEQ ID NO: 34002
  chr9:36258195-36259004
  binary

SEQ ID NO: 40674 - DNA, 1466 bp, Homo sapiens
  chr9:37026222-37027688
  binary
cggagccctctacgggtccaagccagggttctccgaaagagctgaaatgtcgccgccggagccttgaaaggctgcagctcgctgcccaagctacgcgttgccggaggcgggattcccaggtgcctcagcccgggcggccaagtgcgttgtttcaggtcccctgcctgggatccctgcactttgcaaagttagctgcgcggctgcagaggtccgagatccttccggccttagtacctgacccacggtccggcacccccaacccggtcccggcgggagagtgagagaagcgagctcgccgcctacttactatgcatggatgcaaacgggtcgtgcttacagtgtatttccatcggggcgctccagactgcaggccggcccacgccgccgcctcccggcgccaaggggctgcccagggcggatagggagcctcgccaccaggccaggcactgtgcgagctgggctcagaaaacactgctggagcttcggggtctctctcagagcctccctgctggagaccgcccggagctgcgcggagaggcgggaaatggtgctagcgcacccgggctaggagcgggtgcccaactccggctggcttccctccctggctggctcaagcagcagctccgggcccagcccggggtagctgcggccaaggcgcccgcggcttcgggggcatagcgtaggggcccgcctccgggacagccagcagcccccggccccaggaaggagcagctttgaggaggccgccggaacaatcggcccttgacttcactcagggggcggagagacccgggggctgccaggctggttccgcggcctcgatgcttctgaggtccctcctcgacccctcggtctccgccagatcctttctttctctgcttctccgagtctctggggctcggacttgccccctccgcctctctccaactggctctccgacgtctcggacgaagttgcaaagaacttcctctccggcagcgcggggtcctggcgggtttggagatgcttccgcccctgacgctggggccgcgactccggagtccccgggagcgtgcagccctccaacactgagacccgctgccttcaaagttcccgcggcccccgctgctcgcccatcgctgggaccaggaacggggacaccagcgacggactcttcctcgccggggtgtctacctcgtgccaaccaactcttcgagccccgccgccctccctcgtgggtctgattccactgtctttccgctgcctcttccgggacggccgccgtgcctgccccaggcgtggagtgaggaacagaggagagagcagagggtcccagccaccaaggccgccggggctgccggggctgagatggagccgcagtcggctctgactgcctgcgttgccgccgccgccgccgtcgctagccctccgcctgctcggcgcgcacagtgcgccaccgcgccgccccggagccgctttcaggaccc

SEQ ID NO: 40675 - DNA, 167 bp, Homo sapiens; identical to SEQ ID NO: 7619
  chr9:4864421-4864588
  hypo

SEQ ID NO: 40676 - DNA, 384 bp, Homo sapiens; identical to SEQ ID NO: 28282
  chr9:6412586-6412970
  binary

SEQ ID NO: 40677 - DNA, 62 bp, Homo sapiens; identical to SEQ ID NO: 22659
  chr9:71760295-71760357
  hypo

SEQ ID NO: 40678 - DNA, 866 bp, Homo sapiens; identical to SEQ ID NO: 23403
  chr9:71788936-71789802
  hyper

SEQ ID NO: 40679 - DNA, 716 bp, Homo sapiens; identical to SEQ ID NO: 27347
  chr9:77111662-77112378
  hyper

SEQ ID NO: 40680 - DNA, 978 bp, Homo sapiens
  chr9:77113638-77114616
  binary
cggagagtcatgggctccggctcttttgtcagataaagggccggtagtggaaggaggtgctggtgcaccctcgggccaggaccctcgcagtcgcaggcggtggcggcggcggcggcgggaccccggggcgagctggggtctgcagggatgcgcgccagggactgtagcgttacgcttgctccggctggactctgggcctctcgaagggctggagggtgggtttcggggagtcacttggtctcctctcctgccttgccggagacctcaggtttccttcgcgctgtgctcggcctttcttcactcttttactgaagagccaggcgggtgtccgcttgacatggggatctgtgcaagctctgggcacccacccccactcccagtccctcttcctggccacacagcggttaatcgggggctcttctctatccttcgcacgtacccctgggtcttgacaacagaaagttagtaacggccagctccagaccttcttgcatcccagacccggagagaggtggtctaggcagggagcacttgggagagttgggatgcaatcactggtctcctccttccactgaaagtgatcctctcccacccagtccccctacgcccctagaggagcaccccaggaggcagcgggtctcactcccactccctcccgcacccggtgagccccgagcctggactcaagggtttgctggctggacgctgggatgtgtcaggaaagggaaggagaagaaggaacggagagagactgtccatgggggagggggttgactgtagataagaaacaaggacgtcctgatgggatggtcttgattggccggctcgctgggagtggggcacccgtgtgtgtgcgcgctggctccagctgattgtcccggttgggggttggttacacgctccactgtctaaattctttcaagaaactatacttgggcaattggagagtagagaaccttggcttagtaagagacgccc

SEQ ID NO: 40681 - DNA, 635 bp, Homo sapiens; identical to SEQ ID NO: 32349
  chr9:79636822-79637457
  hyper

SEQ ID NO: 40682 - DNA, 600 bp, Homo sapiens; identical to SEQ ID NO: 27350
  chr9:79637630-79638230
  hyper

SEQ ID NO: 40683 - DNA, 330 bp, Homo sapiens; identical to SEQ ID NO: 16168
  chr9:81892891-81893221
  hypo

SEQ ID NO: 40684 - DNA, 993 bp, Homo sapiens
  chr9:82185179-82186172
  binary
cgcatagaaataaacgtctaaaacccagcctgttacattagccaacactcttcttgactttttccgaattttttccctgtccccaagattagccgctcgctagaaaagactgcgagcctcagcagcctccccttgaactggggcgctgcctccagctggacacggactaaggatggaaaggcgcactgacggaggccgcccccatttcccaggcccctccctaggggtgcccctcctcagccatggctgcccctttctctcctcctccagcatctgcccctggggccacccccacctttccgccatctctcgggcccgcgtggcaccctgctctgtttttaacggggataaacttgacttgcttctccaaagagcgggaaaaagaggcgcagtcttggtactgatctgggggagggaacgtcccagggcgcgcaggggcgttttctacccgtgccccgtcggcctgctctgttcagtaccgaccgtgttcggggttcacgtggcccagtcggcaaagtttctttggaggtccagcgtctctgattcccggatcttcagccccacccggagcccccacggttactgccccccgcgacccccgatggagcgtcgggatgcgctttctctccgagtgcctccgggggtggagggagggaggcctgtttcggaactaaatggcaatcacagcccccgcggggcttggagggacgagctccccgcccaccccgcggccccggccccagccagcatctcgcgactccatttctggctctaaacaagaacggggaccgagtcgcgttcacacggaaaattatgccggctccagcggcgcgtaaaattgatgtgaaccgaacgaagtaagatcagcgtgatcctccccctcttgtctcaacaggggtttcggcgcgttacacaaggccgagcttgtctctttaaggagacattggaccctaattagtccgcattcctggcgcggctgcggagcgaggggcc

SEQ ID NO: 40685 - DNA, 1166 bp, Homo sapiens
  chr9:842540-843706
  binary
cgagtttcttgaatgaagtccccccagcatggccgttgccatgcgggtcctgggttgtggagagatgcggcggtacttgccgacagcggcggcgcttggggtcctgggctcccggccacgctacatcgccggtctgggagcgccggagacgcgtctgatcccgcccgccgggcagagttgcgggcttcgctcggctcggggttccccacgatctctcaccctgtgtttcggcggagttgcgggggttccctctgctcccgggtccctgagatccctgatcccgctctcagggcagggaattccggggttcgcccctctgggcttccccgcgatcccagagcccgcgttccaacagaattgggagggtttattgcgctagaggagtcttcaggatcttcgctcccgccctccgaggtgaggctagaggggagggttcgactccaagggaatcccagggatctctagccccgctcttctagcagagaattaaggaattctctccgctttggggtcccaaaaatctccgaccgcgccttgggagcagagggtttcggggttcgatttcctcgagcgtccccagaatctctgactctccctccttgctgagttgcacttaaattagaaaggatcttggagggcggcagcgctggctgctaggttagcgggaaagggaggctcggccggctgctgcttacgcgggtaacctgtcggaaagccttgtttgtttttctggaaaagtcgctgcaatggacacagcgttgcgcggtttccctgcgcgcctggggcgctttttgtcttcgccctccgtggatggaggctgagcgcctcagccattttgagagctctggaaattttattagcattttaaaatttgcattctcgaccgaagattaaagtgcaaattactttgaagatgttttaaagcacgcttaagaattttaaagaatatgcgcaggtggaaaaaagcgcgccagggtttgagatttggtccgtctgtggttttgtttttttgaaggttcgtaagtaggctggtaatttaacattttaacggaaagttaatgtctttagtattctaaaaggatttttggaaggcagtaatccacgttatttccagttaaaagttgtttcatctttttaagacaggttatttaaaatgaaaagataac

SEQ ID NO: 40686 - DNA, 396 bp, Homo sapiens; identical to SEQ ID NO: 22666
  chr9:86590191-86590587
  hypo

SEQ ID NO: 40687 - DNA, 146 bp, Homo sapiens; identical to SEQ ID NO: 22667
  chr9:95381233-95381379
  hypo

SEQ ID NO: 40688 - DNA, 1017 bp, Homo sapiens
  chr9:98111364-98112381
  hyper
cgtaacggcctgtttgcgctccctgcggttacagccgacacacgctcgcagacgcacgcacggacaccccgctttccaccagcgcacgaagacgggacgcgcgctcacagccccagggctcggccctgcaccacgagctaacgcgcggtccccagggaggtggcgcagaaggcatggcgcctctgcccacggcgtcccggtcctggtagtccctatagagaccttcgttgatggcccaggtctaaaaggctttttcctccgagcctgcgttcctccagccttcccgctgggccagggctcaccatccttcctcgccggcgagcgtgggcctccctggaggcgggggtggccctgcagaggcagccccaggtgcgcgctggagaggccggcccgccgcgcgggagacactctttccaaagtggaagcgctgcgtgggcagcagcgcgggccgggccctcggatcccagtctctgttgctcccgagacccccgccccgcgccgcatcctccgagctcagcgccctcgggctgcgctgggcgcagtggctcccggtcagggcgcagtcggcctgggcgctagagcccctctcagctcccggcctagggcggggaagcgccagctcccgcagcccctgtgaaaggtcccctgtgcctcctgcctaggtgcgcgctgtggcatctctggccagaagcacctttggcggcctgttgggcccctcgcagcctctggctgagactctgccgccggcgctaacgggctgcgcccgcgctcccgctctgtccccgcccgggtcccgggctccgcgtgcacaccactccttggccttttccaccaaaacttcctgatctccagttcgatgctgtcgtcgcggttcccggaactgctgtcttcagacggcgagccggggctgggagcggccctcacggggacggactccctccggaggcggaggtggttctcctgacgcgaaaggcaggggcgcgccccggctcccagcgccctgtttttggaaaatac

SEQ ID NO: 40689 - DNA, 393 bp, Homo sapiens; identical to SEQ ID NO: 10035
  chrX:102862914-102863307
  hyper

SEQ ID NO: 40690 - DNA, 31 bp, Homo sapiens
  chrX:103087252-103087283
  binary
cggcggtggggacccggtgtagccgcctccc

SEQ ID NO: 40691 - DNA, 286 bp, Homo sapiens; identical to SEQ ID NO: 27358
  chrX:110924337-110924623
  hyper

SEQ ID NO: 40692 - DNA, 329 bp, Homo sapiens; identical to SEQ ID NO: 27359
  chrX:123094093-123094422
  binary

SEQ ID NO: 40693 - DNA, 198 bp, Homo sapiens; identical to SEQ ID NO: 22673
  chrX:123094505-123094703
  binary

SEQ ID NO: 40694 - DNA, 856 bp, Homo sapiens; identical to SEQ ID NO: 22674
  chrX:129146935-129147791
  binary

SEQ ID NO: 40695 - DNA, 116 bp, Homo sapiens; identical to SEQ ID NO: 10040
  chrX:129171389-129171505
  binary

SEQ ID NO: 40696 - DNA, 158 bp, Homo sapiens; identical to SEQ ID NO: 10041
  chrX:133507338-133507496
  binary

SEQ ID NO: 40697 - DNA, 1047 bp, Homo sapiens; identical to SEQ ID NO: 23409
  chrX:13706949-13707996
  hyper

SEQ ID NO: 40698 - DNA, 958 bp, Homo sapiens; identical to SEQ ID NO: 10044
  chrX:13752377-13753335
  hyper

SEQ ID NO: 40699 - DNA, 861 bp, Homo sapiens; identical to SEQ ID NO: 23410
  chrX:13956243-13957104
  hyper

SEQ ID NO: 40700 - DNA, 252 bp, Homo sapiens
  chrX:14048056-14048308
  hyper
cggaagtccccccctgtgtcgcggacgtcacgttcgcaccgcaggcggtgcagtgctggaggccggaagctgcctgctaatcggctaccccgagtggagcgccggggcggcaggcgtgggatggctgcgggtggcggggccggcggagagggagctgcaccgggcggggcactgggactgtggcgggcacccgcgccgggggtcggacggtgcttctgcaccggcgagataagggtcgcttctgcaccgccc

SEQ ID NO: 40701 - DNA, 373 bp, Homo sapiens; identical to SEQ ID NO: 23411
  chrX:15511311-15511684
  hyper

SEQ ID NO: 40702 - DNA, 678 bp, Homo sapiens; identical to SEQ ID NO: 25998
  chrX:15755988-15756666
  hyper

SEQ ID NO: 40703 - DNA, 1012 bp, Homo sapiens; identical to SEQ ID NO: 22977
  chrX:16729925-16730937
  binary

SEQ ID NO: 40704 - DNA, 839 bp, Homo sapiens; identical to SEQ ID NO: 23413
  chrX:16887827-16888666
  hyper

SEQ ID NO: 40705 - DNA, 187 bp, Homo sapiens; identical to SEQ ID NO: 8822
  chrX:23801086-23801273
  binary

SEQ ID NO: 40706 - DNA, 831 bp, Homo sapiens
  chrX:2846679-2847510
  binary
cggggaacacggccgtgctggaaggcatcgagctggggggttgggggcgggacggggtgcctcttaggaagtggggcgggcaaggctacgcttcgggggatggagccttggggcgggacggggcgcgtcttagtggggcagagcggggggcgcggttcggggcgggtcttagggagcctttgaaggccgaatccgggcagcggtgtagctgggcgtggaaggcggaggacccagcagggcgtgaccggcccagtttccgctccctccgggtcccggccagccttcctccgccctcccttcccttcctcctttgttctctttccctgcccttccgccttcccttcagttcggtctcctccacccgcccttcgtcccctcagtcgccccccatccctgggctctgctgtctggcgtctttcccgggcacagaacgcgcctccagctacattttggagactacaaggcgccggacacaaccacgccctttacaggggcccaggctcgcccggggcgcccctcgccgtgctcgcgaccccctccccaggcccccaccctaggccttagtatgggccgcgtcccggggtcccaggcacctggcggcgggcgcggcgcgtcccctccgcgcggcggatcgcatggccgagcgctggcccagagcgcaggaccttgccctgcgcactccgcgcccgggcgccgctagtgccaaggcttccgccctctcagctgcgggatctgggccgggcgcccgcccctccttcatccgcgtcatctcctggctctcgggacctccgggacctgcgcgtggaaacaggttttcccaggtcgtcacac

SEQ ID NO: 40707 - DNA, 600 bp, Homo sapiens
  chrX:39680202-39680802
  hyper
cgcacggcttggagcgggcgtataaattaaccgggggccgcagagtgaatacattgcacgcggtatttattatgcggccggacctccgaggggttctccggctcccggacgtggcaaatcttgtccggagcgccgctggccgcgctgccaagggctaggacgagaggacccgtggcggggggcggggggcttctcctccagtcctcgggagccccggggcagcccgcttacagcggcggcagcggggagggtttaggcgaggagagacgcggccccgggcgccgctcgggctaggggccgggcggggagggcggggcggtgggagcgggcggcgcgcccggccccttagcattccgccggcgcgcccgccatcgccgcgtgcgcccccgcgccccgctgtaattaccccgattaccaaatgaatctcgcgcttttgtgctcgccgggcggtgggtgcggggaggcagttctaatagttgtcattagggccgggggaggcggggcgccgggggctgagggtgggagcgcgggggtgggggaggcccgccattccctcgctggctcgcttgttcgctggcggtcccaggcggcgcgcaggcc

SEQ ID NO: 40708 - DNA, 304 bp, Homo sapiens; identical to SEQ ID NO: 27369
  chrX:39871661-39871965
  hyper

SEQ ID NO: 40709 - DNA, 510 bp, Homo sapiens; identical to SEQ ID NO: 10054
  chrX:39873113-39873623
  hyper

SEQ ID NO: 40710 - DNA, 794 bp, Homo sapiens; identical to SEQ ID NO: 22697
  chrX:39873679-39874473
  hyper

SEQ ID NO: 40711 - DNA, 223 bp, Homo sapiens; identical to SEQ ID NO: 22698
  chrX:39921413-39921636
  binary

SEQ ID NO: 40712 - DNA, 301 bp, Homo sapiens; identical to SEQ ID NO: 22699
  chrX:39922006-39922307
  binary

SEQ ID NO: 40713 - DNA, 863 bp, Homo sapiens; identical to SEQ ID NO: 10055
  chrX:39931611-39932474
  binary

SEQ ID NO: 40714 - DNA, 892 bp, Homo sapiens; identical to SEQ ID NO: 8823
  chrX:39933533-39934425
  binary

SEQ ID NO: 40715 - DNA, 1028 bp, Homo sapiens; identical to SEQ ID NO: 27372
  chrX:39953610-39954638
  hyper

SEQ ID NO: 40716 - DNA, 3660 bp, Homo sapiens; identical to SEQ ID NO: 27373
  chrX:39954918-39958578
  binary

SEQ ID NO: 40717 - DNA, 948 bp, Homo sapiens; identical to SEQ ID NO: 27374
  chrX:39963967-39964915
  hyper

SEQ ID NO: 40718 - DNA, 1317 bp, Homo sapiens; identical to SEQ ID NO: 10062
  chrX:39965255-39966572
  hyper

SEQ ID NO: 40719 - DNA, 898 bp, Homo sapiens; identical to SEQ ID NO: 27376
  chrX:39968299-39969197
  hyper

SEQ ID NO: 40720 - DNA, 2818 bp, Homo sapiens
  chrX:40012149-40014967
  hyper
cgagagggcgggaggagacagggagacttccgcgggaggccgatggtcaaagtggggggtgaaaccgctcagggtgaccgggctggagacccaggaacccgattcggcgcgaaggtgccgcgcgagttccagcgagcagcctgcccggccaagtggcgcctgcccagccgtcggccgtgccagcttcctgccctgcccaggaccgcggagcagtcggggacgccgccgcaggctggcccggaatcgcaggacagcggcggggggagggggtagccaggccgcaagtaaactcgcactagagctttctgcacacctccgccctagagagggggcccggacccccggtctgtgaggcgtcggctttggccttccaaccttggggtgcgcgaggaagcaaagacccagggggcacccccaccctcgcccaaggcccgagggtgggggacagctgaaatgtctttggtcttgtttgatgaccgcttggcggatctgctcccatccgggttctgccgttccgagagtgccgggtcagtgatacccaggccggtctgagcaggcatgtggatgagcaaaagcaaatctgtcgctcctccgaccgccacccctcacttaacctttcctgcatccaaggaaggggagggcacccagactctgccccaccccccgcggggcgctccctctgcctcggaagctgagactaagagcgagggttttccccctttcccctgggctcgctgggtttctaacttcctctaaacctccctcctcgctccgaaaagccccgaggagaggagctgagaggaagcacgccgctagtgtgcaaaatgaagaccatgtgtgaggacggcggcatcagagtgcagccgcgggggttagggggtggcaaaggcccccgcgcggccggaggctcggggccgcagcagccagtgcctctgctctgcgttggggactcggagccgcagcgagaggcagtggagaggcagggctggcctcgtggcgggaggcgaggagggggtgcgagggctgccgcgccgtggggggcagggggcggggacgcagccccggcttcctgggccgcagctgcgaccgagggcgcaagagcagatcgtgctctgcggcggtggcggctcgggcccgccgctctagcagctgagaatcaacaaagggaggcggcgggggaggggcgccaccgagcgttcgctggctgctctggaataataaaaaataattaataatgataataagagaaaaatcccccggctttcatggctctgggtttccgtgtggctgcagcgggaagcgcgctgtccttgaggcggcctctctcgcctggcctgcccgcccctccccctcctcgccccctcccctccccaggaaccgggaagagaaaggtctgcagctgacaaatattatccattctccccatcgatcgcggagtgtacagatgtgagcgcttgatgtgcccgcggagcggcggatcctccctgctcgctcgctctcgcccaggctccgctcgccgtccccctcctccccctttgttctcctcccctttccctctctttaaatagatttcagggcgctgcctgttggagagcagctggcgatctctcccgagagagggagcgagcgaagcccgaggtgccctgtcaccagcctcccctcccccacctcggcttttctctacgtcccccccaccccacctttctccagtttccaaaatagaaaacaccgggaacacccacgtccactgcaccgcgagcccctgggagcctttggacccctcgtgctgttccttgtgtctgtgtctgtgcagaggaagggcagtgcagggaggggacccagggccgcggcagaagagccaagggtccggatctttccctggcagcagcagggacgcagcgtgggtcacgctaacagggtacagtttacccattagggaaagtcggcggagacggccctgttattcctcttttgcagatggcagattaatccggcagcacccggcctcaaagggaccggctgctcggcaaagggttaacccgtcggccggtaatcgtggacacgcgcgcacacacacacacgcacgcgcgcgcgcgtcctctccgcctgcccgagcgcccgccgcggcccgcagtgcgcccggggctgggggagtagctgcgggaggggagggggtcgggggaggggcggggcgggcttaaccaggccgctcgactgagccggggccacctcgccgtctgtcacttaaatgattgtcctccgctccgctcagtgcggtcagtacgggctgttaacaggcagttgcaatcagtttccgaaaggtcagccaaggtcctccggctctcgcagacggaaggcattacgaaaccgcttttgtatctgcaggcactttagaaaaagaggcgagaaggggcgcaccgcagtgccgcggctgctgcgaccgggggagagggtcgggggctgcggagcagaggagtccgcacccccgcggccagggtcaggcggcgtggatatcacccgcggagtgacccagggcctccgggtttcggtggggaagcaggaagggggtggggagcaggcggcaagggaaggaggagtgggaggaagtgggagaggcgtcctggctcctctcctcacccagccaacagcccacacccggacccagacgggagcgggcggccttggacgcgaggagaccccactcggactctcaggccctcctggcgcctggaagtagggagggggtgtgggggggggaaagaccctcgccgagcgagcgagtcccagcgcggtgtctgaagacgctgctgccgccgcc

SEQ ID NO: 40721 - DNA, 553 bp, Homo sapiens; identical to SEQ ID NO: 27379
  chrX:40017447-40018000
  hyper

SEQ ID NO: 40722 - DNA, 1261 bp, Homo sapiens
  chrX:40030835-40032096
  hyper
cggatggaaaccgaggcacgcagccctcgaccccggccaggcgtggagtaggggagcagggggtgccccgcgtgggcgcaccctaagaaaccagtgcggacatggcgagcgagaccagagcgcagttgtgtgtggtttttccccaggtttttattcttccagccctgtggaaaggaggagagccgcaacccggagagggagccggaaagaaacacttaatcaccggcgtctcgctgctcgtcacgcgaagatggcagcggctcccctgggtttcaaggttccgggaaaggcgtgtgttctgccttaaggcgcgcgggctgatgcgctctctccctcggctcggcggccggctccggctcacagagcctctctcaacgccggcaagtgcagccgggccgcccagcccccaggccagcctggccccctctgggcctggggttggcgagggcagctgggcgtctgcgctgcccagcccagccgcggatccatggggtttcgcgagctgaaagtaaaggcttgagggagtggggacacccacaccgacccgcggcacgcaggggagtcaagctgcggccaatgcaagacgagcagggtagactactactagcggtggccggaggctcagccaccttcgcgggagaggggatttaccgccaccctcatccacgcgcaggccccaccgcccggtcctctcctctgatccccgggccattgcgaaacacggagcgaacaggtcctcgccagcagccgtcatttcccgggaagatgggaacccacaagcctgactgtgcttcctaaggatactagcgtgcgcgcagaccttggggggaaagagggcagcgcggtctccccgacccggactcttccctggcgcagcacacaaccgccacgggcttccgaagcgcccgagcggggaggaggaaggaaaagcggaggcccgggaggcgggctgcgcgcttggaagccgtgtgtgtttatgtgtctgcgcgcgcgccctggccggacgggtgttgaggggagagtgatcgtgagcaacccggaaccagcagtcccaacctggactgacgaactgggctctccagtcctgggccgtggggctccatgcctcgggctggcgggacaagcggcggggagcccggagcttcggagccgccgccgggcatctagccagctccgcgggagaagcccgggggcgcgtcgggagccaggggactggtgtgaactagccgcccccgcaggcggacgtttagctccggcaccc

SEQ ID NO: 40723 - DNA, 2334 bp, Homo sapiens; identical to SEQ ID NO: 26003
  chrX:40034239-40036573
  binary

SEQ ID NO: 40724 - DNA, 170 bp, Homo sapiens; identical to SEQ ID NO: 23415
  chrX:40126403-40126573
  hyper

SEQ ID NO: 40725 - DNA, 205 bp, Homo sapiens; identical to SEQ ID NO: 6337
  chrX:40506434-40506639
  hyper

SEQ ID NO: 40726 - DNA, 201 bp, Homo sapiens; identical to SEQ ID NO: 26004
  chrX:68758240-68758441
  hyper

SEQ ID NO: 40727 - DNA, 1885 bp, Homo sapiens
  chrX:71525281-71527166
  hyper
cgttgtttgcggacagctcggctgccctcctcgccgcatcccagatggagccgcggaaccgggggcggccgggagcatcccttgcacggcgggcgcgtgcacccaggccaccggggccctgagcgtccgttcccgcaagtgctgtatcaggaactgatcttagagacaggatggacaggcaggaaggggcacggggtgtcggcctccgcggcgagtccgcactccggcgccggctgctgccactctcgcgcctgatcaacacttactgagcgcccgctgagcatccgacgcggcagcaggctgagcctaccccctagccaagccgcctgcggtcagtgctaaaaccccgctaggagaagagtgagagaggctcggagaggtgcggtaacttgcccaaggtcacagcgctagaaagtggcggagccgggattcgcagccaggtctctctgactccaagtccggtgctctgcgaagcagggactcggcgcgcggctcgccagcccgcgtttatagggagaggggtgtgcgcgtgggtgtgtgtgtgtgggcgtgtgtcgggggaggggagggctgaggtcgactgggcagtagaggcaagttgcccaaattcgctaacttccatcccgcaattccgctgaactcggcccgaaaagccccctcttgcctcaattccccgaagtaaatctgagctttgtgcagctccggagccagagcgtccagatgcggtccgggagattagcaaagtcggtggaagccaagctggagaaagcgcgggcgcagggagaaaaggtgctgccgtctccccgggagaagcgggcacccggccccgctggccggcaggggggcgcgctggcaagcgaacccgagcgctggcgggcgggcgggcgggcggcccctcgcccccagcagagcagctttccaacagaaagcaagtctccccagaaccctccggcccgcctggcggccgcccactccccatacccgctccacgggagtcctcggccccgccgcccagcccggcgcccagcccggcggcccggcttacctctgagaagccgcctgccctggagagagggaagcgcggagctcggtgagccgcaagagaggcggcggagcccccagcccctggcacgcacgccgccgccaccgctaccgcgaaccggtcgcgctcagcgcccgcggccgcgccgttggccacccgaccccggggcgcctgggaaaagcccgcaccgcgccgcgccgccgctgcaccgcacagtgccgcgccaagcagcccctgaccgagctggtgcccgcccgcccgcccgcagcttcggcgccggactccggggcggtggcggtggcggccaccgcgctcccttcccggcgctggggacccggctctcaagcccccattgccgcccggagagccctgacgcacacgcacacggcagcagactggcctcggctaggaatcccaggaaggacagaccctttttttccctttttttttctcccctcaatttccacgtctttataaccggcttagggcattattagcacatgtcctggctcgtgggcgagttggtggcaaaatctgaactggatactcacggagggcccgcgcgggtgctgtgccgtccgctgctctcttcctcctcaccgagaactgcccctcgccggcggactacaagagggcagccgggcagagcgagcttcctctcggcagctcagcggtgccccttctgcagctttgccgccgggcacatttttatagcagcggctggcgtctgtggccctttaaaggcgctcgagctggtgcagtcaccgcggatcgtgtgaaagcaaagggccggctggggaacggagtccacgcggccacgcgagtccggcagccctgtggacc

SEQ ID NO: 40728 - DNA, 1481 bp, Homo sapiens
  chrX:8698814-8700295
  binary
cgagaagaagaaggagagaaggatgagagaagagaaaaataagcggaggatttcagagctcgcacgctcgacagggctggtacaggcagcagctgcactcgctcgcgctgagtccggaacctgctctcgtgcgcccacccgcacccggagcctcgcgcaagtcccgcgggggtccgcgccacagggcagagtcccggcaacccgctggagccaagcgcgcggctcccggagcctcccacacaagcgcgcgcgcacacacacatactccccaccctcaggctgaaagaacctacgttcggggtttgggggacggttcccccgggactcgttgaggagtatccgaatacggccccgccaaatcccctgtccccggcacttcttccctgacgctctacgctagtccagggcaagaccttgaatctttggggttccgaattgaggcgcgcacagccactcgcacccccaacacgcgcatacacgcaccctggaacacgacttggcacaagtaccctggctggggctccaagggtgggcagcgagctctgagccctcagagagtgaaaaccatctttcaaaagagacaaagtgtcggcccgcgggcacctgcggggctggggctcgaggtgaggtccccaggcgcagccggacgcgcctcccagactccctcccagtgccccggagcgcctgggactttgcgggagtcgccgcccgcccggagtctcgcgcactccaattcccgggaaaccgccacatccacacacccactcccagcatccacgactctccctccccagggaaatcgcctttggtttcctgctgggaaggagggagttggggcaagatgtctcgggcttctttttcttttcaggagccgggaagaggctggaaaggagagttccagcaccccgactgtaagatccacgcccaggggaagccaggatcagccggcggcgctggccgagaactttgcgagcccaggctgggaggcgcgcgccccggtgcgcccacgccgcggccgcagccccagaaagaacccgggcgggggcctccccgtacctggaagtgctggaagaaggcggagatgcgagtgatctgcaggctcaggcacctggaggcgcagcgagcgcgctggacgctcccggcagacagcgactcgtccagccgccgcgcagcagccgcgccggggccggccgccaggcagccgctggaggccgccagccagaggcagagggtcaggaccgcgccgggcaccccgggcaccatggctgcgggtcgagggcgagggcgagggcgccgggcgcgggccgaggctccctgctccgcgccggggctgcactgctgaggaccaggcagacgccgcgactgagccggaaagttcaatccttcaactccggccggaccctcctcgccgacctccctcccagctcgccctcgaggggtggggtgagggggacaggaggccgcaccattggctggaaggc

SEQ ID NO: 40729 - DNA, 1292 bp, Homo sapiens
  chrX:9432830-9434122
  binary
cgtgggggagcggggcgggcttggtagggacgctggtcccccgaccgtgggacaggggctgggttgggacgcgggtccccactaggagccgcgggggaggggcagggccggagtccctaccctcgtaggggaggggctggttcgggacgcggctcccccggggcgcaggggcggggccgggtggtacgccgggtcccctcccacggccgtgagggaggggccggcggcgggggcggacccctggcggtcctcctggctggggtccgcgcgctcgcggcagctccccgtggaggtcactgtccgtgccagtccctcccgctgtcccgccctctcccgctgccgccgccgccgccgccgcgcccgcctcagcgcccccactccgcgcttgggagcgaggagccgccagcgcccccgccccgccgccgccgcagcgccctcaggccgccattcgccaccgaaactttccagcgcccgcgctctctccgggactcggcggcggcggggcgggggcggcccgggggcggcgcgcggctgctccggggcgccgggccctcttcggccgccgcacggccgggactcggaggctgccggctggagggaggttcggagcgcggccgggcgcgcggcgccgccacaagttgcgctgctcgcgacgaggtgagtgcgcagggctcggcgggccgggcgcggggtccgcaaacttctgcggggaggcgggtcccgcgctgaccctccagggtccggccggcggctcggggcgcccgaacgctccacccgcccctggaactcctgtaggtgcaggtcgccaactgtccccgcggcgctcggactggggtgcggcgcgctcccaggagcctgaacaataccccgaggtggccgctccccgaagtgccggcgcgccttgcggggagagacggaggtcggcggggggctcctttgttttggggagggggaagtggccggtaagtttagggaagcgctcggcttttcctccggtgcccctttgtctgccgattcaggggcttgctgggcaaacctgcgccaccgcgggctccggggaccggggtggagggcggtggcgggatttccccgctgttggggagaagagccccattcatacccgggacgcgggccggccctcccggacccgggtggaagcgcagcctcgcggagtggggcaagcggcgggcgaggtggcgcgggccccgtgtctgctcagtttctgacgcgcagaaactgtcaaggaagtcgggagccccagtcctccgcccatctccccggcctgagcgcac

SEQ ID NO: 40730 - DNA, 293 bp, Homo sapiens; identical to SEQ ID NO: 27387
  chrX:95940048-95940341
  hyper

SEQ ID NO: 40731 - DNA, 483 bp, Homo sapiens; identical to SEQ ID NO: 27388
  chrX:9753679-9754162
  hyper
